(19) United States
(12) Patent Application Publication
(10) Pub. No.: US 2024/0229026 A1
(43) Pub. Date: Jul. 11, 2024

(54) CHIRAL CONTROL

(71) Applicant: WAVE LIFE SCIENCES LTD., Singapore (SG)

(72) Inventors: David Charles Donnell Butler, Medford, MA (US); Naoki Iwamoto, Boston, MA (US); Meena ., Belmont, MA (US); Nenad Svrzikapa, Cambridge, MA (US); Gregory L. Verdine, Boston, MA (US); Ivan Zlatev, Cambridge, MA (US)

(21) Appl. No.: 18/313,032

(22) Filed: May 5, 2023

Related U.S. Application Data
(63) Continuation of application No. 16/717,986, filed on Dec. 17, 2019, now Pat. No. 11,643,657.
Application No. 16/717,986 is a division of application No. 15/462,787, filed on Mar. 17, 2017, now Pat. No. 10,590,413.
Application No. 15/462,787 is a division of application No. 14/414,614, filed on Jan. 13, 2015, now Pat. No. 9,982,257.
(60) Provisional application No. 61/671,722, filed on Jul. 14, 2012.
(60) Provisional application No. 61/671,724, filed on Jul. 14, 2012.
(60) Provisional application No. 61/671,655, filed on Jul. 13, 2012.
(60) Provisional application No. 61/671,656, filed on Jul. 13, 2012.

(51) Int. Cl. C12N 15/113; C07C 317/28; C07D 295/088; C07H 21/00; C12N 15/11; C12Q 1/6876

(52) U.S. Cl. CPC C12N 15/113; C07C 317/28; C07D 295/088; C07H 21/00; C12N 15/11; C12Q 1/6876; C12N 15/111; C12N 2310/11; C12N 2310/14; C12N 2310/31; C12N 2310/315; C12N 2330/30

(57) ABSTRACT

The present invention relates to chirally controlled oligonucleotides, chirally controlled oligonucleotide compositions, and the method of making and using the same. The invention specifically encompasses the identification of the source of certain problems with prior methodologies for preparing chiral oligonucleotides, including problems that prohibit preparation of fully chirally controlled compositions, particularly compositions comprising a plurality of oligonucleotide types. In some embodiments, the present invention provides chirally controlled oligonucleotide compositions. In some embodiments, the present invention provides methods of making chirally controlled oligonucleotides and chirally controlled oligonucleotide compositions.

### CROSS-REFERENCE TO RELATED APPLICATIONS

[0001] This application is a Continuation of application Ser. No. 16/717,986, filed on Dec. 17, 2019, issued as U.S. Pat. No. 11,643,657, which is a Division of application Ser. No. 15/462,787, filed on Mar. 17, 2017, issued as U.S. Pat. No. 10,590,413, which is a Division of application Ser. No. 14/414,614, filed on Jan. 13, 2015, issued as U.S. Pat. No. 9,982,257, which is a 371 National Stage Application of PCT International Application PCT/US13/50407, filed Jul. 12, 2013, which claims priority to U.S. Provisional Application Ser. No. 61/671,655, filed Jul. 13, 2012, 61/671,656, filed Jul. 13, 2012, 61/671,722, filed Jul. 14, 2012, and 61/671,724, filed Jul. 14, 2012, the entirety of each of which is incorporated herein by reference.

### SEQUENCE LISTING

[0002] The instant application contains a Sequence Listing which has been submitted electronically in XML format and is hereby incorporated by reference in its entirety. Said XML copy, created on Oct. 19, 2023, is named “SequenceListing.xml,” and is 2,757,959 bytes in size.

### BACKGROUND OF THE INVENTION

[0003] Oligonucleotides are useful in therapeutic, diagnostic, research and nanomaterials applications. The use of naturally occurring nucleic acids (e.g., unmodified DNA or RNA) for therapeutics can be limited, for example, because of their instability against extra- and intracellular nucleases and/or their poor cell penetration and distribution. Additionally, in vitro studies have shown that properties of antisense oligonucleotides such as binding affinity, sequence specific binding to the complementary RNA (Cosstick and Eckstein, 1985; LaPlanche et al., 1986; Latimer et al., 1989; Hacia et al., 1994; Mesmaeker et al., 1995), and stability to nucleases can be affected by the absolute stereochemical configurations of the phosphorus atoms (Cook, et al. U.S. Ser. No. 00/559,9797A). Therefore, there is a need for new and improved oligonucleotide compositions.

### SUMMARY OF THE INVENTION

[0004] The present invention encompasses the recognition that there exists a need for chirally controlled oligonucleotide compositions and new methods for synthesizing the same. The invention specifically encompasses the identification of the source of certain problems with prior methodologies for preparing chiral oligonucleotides, including problems that prohibit preparation of fully chirally controlled compositions, particularly compositions comprising a plurality of oligonucleotide types.

[0005] In some embodiments, the present invention provides chirally controlled oligonulcleotide compositions.

[0006] In some embodiments, the present invention provides methods of making chirally controlled oligonucleotides and chirally controlled oligonucleotide compositions.

[0007] In some embodiments, the present invention provides methods of using chirally controlled oligonulcleotide and chirally controlled oligonucleotide compositions.

[0008] All publications and patent documents cited in this application are incorporated herein by reference in their entirety.

### Definitions

[0009] Aliphatic: The term “aliphatic” or “aliphatic group”, as used herein, means a straight-chain (i.e., unbranched) or branched, substituted or unsubstituted hydrocarbon chain that is completely saturated or that contains one or more units of unsaturation, or a monocyclic hydrocarbon or bicyclic or polycyclic hydrocarbon that is completely saturated or that contains one or more units of unsaturation, but which is not aromatic (also referred to herein as “carbocycle” “cycloaliphatic” or “cycloalkyl”), that has a single point of attachment to the rest of the molecule. In some embodiments, aliphatic groups contain 1-50 aliphatic carbon atoms. Unless otherwise specified, aliphatic groups contain 1-10 aliphatic carbon atoms. In some embodiments, aliphatic groups contain 1-6 aliphatic carbon atoms. In some embodiments, aliphatic groups contain 1-5 aliphatic carbon atoms. In other embodiments, aliphatic groups contain 1-4 aliphatic carbon atoms. In still other embodiments, aliphatic groups contain 1-3 aliphatic carbon atoms, and in yet other embodiments, aliphatic groups contain 1-2 aliphatic carbon atoms. In some embodiments, “cycloaliphatic” (or “carbocycle” or “cycloalkyl”) refers to a monocyclic or bicyclic C₃-C₁₀ hydrocarbon that is completely saturated or that contains one or more units of unsaturation, but which is not aromatic, that has a single point of attachment to the rest of the molecule. In some embodiments, “cycloaliphatic” (or “carbocycle” or “cycloalkyl”) refers to a monocyclic C₃-C hydrocarbon that is completely saturated or that contains one or more units of unsaturation, but which is not aromatic, that has a single point of attachment to the rest of the molecule. Suitable aliphatic groups include, but are not limited to, linear or branched, substituted or unsubstituted alkyl, alkenyl, alkynyl groups and hybrids thereof such as (cycloalkyl)alkyl, (cycloalkenyl)alkyl or (cycloalkyl)alkenyl.

[0010] Alkylene: The term “alkylene” refers to a bivalent alkyl group. An “alkylene chain” is a polymethylene group, i.e., —(CH₂)ₙ—, wherein n is a positive integer, preferably from 1 to 6, from 1 to 4, from 1 to 3, from 1 to 2, or from 2 to 3. A substituted alkylene chain is a polymethylene group in which one or more methylene hydrogen atoms are replaced with a substituent. Suitable substituents include those described below for a substituted aliphatic group.

[0011] Alkenylene: The term “alkenylene” refers to a bivalent alkenyl group. A substituted alkenylene chain is a polymethylene group containing at least one double bond in which one or more hydrogen atoms are replaced with a substituent. Suitable substituents include those described below for a substituted aliphatic group.

[0012] Animal: As used herein, the term “animal” refers to any member of the animal kingdom. In some embodiments, “animal” refers to humans, at any stage of development. In some embodiments, “animal” refers to non-human animals, at any stage of development. In certain embodiments, the non-human animal is a mammal (e.g., a rodent, a mouse, a rat, a rabbit, a monkey, a dog, a cat, a sheep, cattle, a primate, and/or a pig). In some embodiments, animals include, but are not limited to, mammals, birds, reptiles, amphibians, fish, and/or worms. In some embodiments, an animal may be a transgenic animal, a genetically-engineered animal, and/or a clone.

[0013] Approximately: As used herein, the terms “approximately” or “about” in reference to a number are generally taken to include numbers that fall within a range of 5%, 10%, 15%, or 20% in either direction (greater than or less than) of the number unless otherwise stated or otherwise evident from the context (except where such number would be less than 0% or exceed 100% of a possible value). In some embodiments, use of the term “about” in reference to dosages means±5 mg/kg/day.

[0014] Aryl: The term “aryl” used alone or as part of a larger moiety as in “aralkyl,” “aralkoxy,” or “aryloxyalkyl,” refers to monocyclic and bicyclic ring systems having a total of five to fourteen ring members, wherein at least one ring in the system is aromatic and wherein each ring in the system contains three to seven ring members. The term “aryl” may be used interchangeably with the term “aryl ring.” In certain embodiments of the present invention, “aryl” refers to an aromatic ring system which includes, but not limited to, phenyl, biphenyl, naphthyl, anthracyl and the like, which may bear one or more substituents. Also included within the scope of the term “aryl,” as it is used herein, is a group in which an aromatic ring is fused to one or more non-aromatic rings, such as indanyl, phthalimidyl, naphthimidyl, phenanthridinyl, or tetrahydronaphthyl, and the like.

[0015] Characteristic portion: As used herein, the phrase a “characteristic portion” of a protein or polypeptide is one that contains a continuous stretch of amino acids, or a collection of continuous stretches of amino acids, that together are characteristic of a protein or polypeptide. Each such continuous stretch generally will contain at least two amino acids. Furthermore, those of ordinary skill in the art will appreciate that typically at least 5, 10, 15, 20 or more amino acids are required to be characteristic of a protein. In general, a characteristic portion is one that, in addition to the sequence identity specified above, shares at least one functional characteristic with the relevant intact protein.

[0016] Characteristic sequence: A “characteristic sequence” is a sequence that is found in all members of a family of polypeptides or nucleic acids, and therefore can be used by those of ordinary skill in the art to define members of the family.

[0017] Characteristic structural element: The term “characteristic structural element” refers to a distinctive structural element (e.g., core structure, collection of pendant moieties, sequence element, etc) that is found in all members of a family of polypeptides, small molecules, or nucleic acids, and therefore can be used by those of ordinary skill in the art to define members of the family.

[0018] Comparable: The term “comparable” is used herein to describe two (or more) sets of conditions or circumstances that are sufficiently similar to one another to permit comparison of results obtained or phenomena observed. In some embodiments, comparable sets of conditions or circumstances are characterized by a plurality of substantially identical features and one or a small number of varied features. Those of ordinary skill in the art will appreciate that sets of conditions are comparable to one another when characterized by a sufficient number and type of substantially identical features to warrant a reasonable conclusion that differences in results obtained or phenomena observed under the different sets of conditions or circumstances are caused by or indicative of the variation in those features that are varied.

[0019] Dosing regimen: As used herein, a “dosing regimen” or “therapeutic regimen” refers to a set of unit doses (typically more than one) that are administered individually to a subject, typically separated by periods of time. In some embodiments, a given therapeutic agent has a recommended dosing regimen, which may involve one or more doses. In some embodiments, a dosing regimen comprises a plurality of doses each of which are separated from one another by a time period of the same length; in some embodiments, a dosing regime comprises a plurality of doses and at least two different time periods separating individual doses. In some embodiments, all doses within a dosing regimen are of the same unit dose amount. In some embodiments, different doses within a dosing regimen are of different amounts. In some embodiments, a dosing regimen comprises a first dose in a first dose amount, followed by one or more additional doses in a second dose amount different from the first dose amount. In some embodiments, a dosing regimen comprises a first dose in a first dose amount, followed by one or more additional doses in a second dose amount same as the first dose amount.

[0020] Equivalent agents: Those of ordinary skill in the art, reading the present disclosure, will appreciate that the scope of useful agents in the context of the present invention is not limited to those specifically mentioned or exemplified herein. In particular, those skilled in the art will recognize that active agents typically have a structure that consists of a core and attached pendant moieties, and furthermore will appreciate that simple variations of such core and/or pendant moieties may not significantly alter activity of the agent. For example, in some embodiments, substitution of one or more pendant moieties with groups of comparable three-dimensional structure and/or chemical reactivity characteristics may generate a substituted compound or portion equivalent to a parent reference compound or portion. In some embodiments, addition or removal of one or more pendant moieties may generate a substituted compound equivalent to a parent reference compound. In some embodiments, alteration of core structure, for example by addition or removal of a small number of bonds (typically not more than 5, 4, 3, 2, or 1 bonds, and often only a single bond) may generate a substituted compound equivalent to a parent reference compound. In many embodiments, equivalent compounds may be prepared by methods illustrated in general reaction schemes as, for example, described below, or by modifications thereof, using readily available starting materials, reagents and conventional or provided synthesis procedures. In these reactions, it is also possible to make use of variants, which are in themselves known, but are not mentioned here.

[0021] Equivalent Dosage: The term “equivalent dosage” is used herein to compare dosages of different pharmaceutically active agents that effect the same biological result. Dosages of two different agents are considered to be “equivalent” to one another in accordance with the present invention if they achieve a comparable level or extent of the biological result. In some embodiments, equivalent dosages of different pharmaceutical agents for use in accordance with the present invention are determined using in vitro and/or in vivo assays as described herein. In some embodiments, one or more lysosomal activating agents for use in accordance with the present invention is utilized at a dose equivalent to a dose of a reference lysosomal activating agent; in some such embodiments, the reference lysosomal activating agent for such purpose is selected from the group consisting of small molecule allosteric activators (e.g., pyrazolpyrimidines), imminosugars (e.g., isofagomine), antioxidants (e.g., n-acetyl-cysteine), and regulators of cellular trafficking (e.g., Rabla polypeptide).

[0022] Heteroaliphatic: The term “heteroaliphatic” refers to an aliphatic group wherein one or more units selected from C, CH, CH₂, or CH₃ are independently replaced by a heteroatom. In some embodiments, a heteroaliphatic group is heteroalkyl. In some embodiments, a heteroaliphatic group is heteroalkenyl.

[0023] Heteroaryl: The terms “heteroaryl” and “heteroar-,” used alone or as part of a larger moiety, e.g., “heteroaralkyl,” or “heteroaralkoxy,” refer to groups having 5 to 10 ring atoms, preferably 5, 6, or 9 ring atoms; having 6, 10, or 14 n electrons shared in a cyclic array; and having, in addition to carbon atoms, from one to five heteroatoms. The term “heteroatom” refers to nitrogen, oxygen, or sulfur, and includes any oxidized form of nitrogen or sulfur, and any quaternized form of a basic nitrogen. Heteroaryl groups include, without limitation, thienyl, furanyl, pyrrolyl, imidazolyl, pyrazolyl, triazolyl, tetrazolyl, oxazolyl, isoxazolyl, oxadiazolyl, thiazolyl, isothiazolyl, thiadiazolyl, pyridyl, pyridazinyl, pyrimidinyl, pyrazinyl, indolizinyl, purinyl, naphthyridinyl, and pteridinyl. The terms “heteroaryl” and “heteroar-,” as used herein, also include groups in which a heteroaromatic ring is fused to one or more aryl, cycloaliphatic, or heterocyclyl rings, where the radical or point of attachment is on the heteroaromatic ring. Nonlimiting examples include indolyl, isoindolyl, benzothienyl, benzofuranyl, dibenzofuranyl, indazolyl, benzimidazolyl, benzthiazolyl, quinolyl, isoquinolyl, cinnolinyl, phthalazinyl, quinazolinyl, quinoxalinyl, 4H-quinolizinyl, carbazolyl, acridinyl, phenazinyl, phenothiazinyl, phenoxazinyl, tetrahydroquinolinyl, tetrahydroisoquinolinyl, and pyrido[2,3-b]-1,4-oxazin-3 (4H)-one. A heteroaryl group may be mono- or bicyclic. The term “heteroaryl” may be used interchangeably with the terms “heteroaryl ring,” “heteroaryl group,” or “heteroaromatic,” any of which terms include rings that are optionally substituted. The term “heteroaralkyl” refers to an alkyl group substituted by a heteroaryl, wherein the alkyl and heteroaryl portions independently are optionally substituted.

[0024] Heteroatom: The term “heteroatom” means one or more of oxygen, sulfur, nitrogen, phosphorus, or silicon (including, any oxidized form of nitrogen, sulfur, phosphorus, or silicon; the quaternized form of any basic nitrogen or; a substitutable nitrogen of a heterocyclic ring, for example N (as in 3,4-dihydro-2H-pyrrolyl), NH (as in pyrrolidinyl) or NR* (as in N-substituted pyrrolidinyl)).

[0025] Heterocycle: As used herein, the terms “heterocycle,” “heterocyclyl,” “heterocyclic radical,” and “heterocyclic ring” are used interchangeably and refer to a stable 3- to 7-membered monocyclic or 7-10-membered bicyclic heterocyclic moiety that is either saturated or partially unsaturated, and having, in addition to carbon atoms, one or more, preferably one to four, heteroatoms, as defined above. When used in reference to a ring atom of a heterocycle, the term “nitrogen” includes a substituted nitrogen. As an example, in a saturated or partially unsaturated ring having 0-3 heteroatoms selected from oxygen, sulfur or nitrogen, the nitrogen may be N (as in 3,4-dihydro-2H-pyrrolyl), NH (as in pyrrolidinyl), or ⁺NR (as in N-substituted pyrrolidinyl).

[0026] A heterocyclic ring can be attached to its pendant group at any heteroatom or carbon atom that results in a stable structure and any of the ring atoms can be optionally substituted. Examples of such saturated or partially unsaturated heterocyclic radicals include, without limitation, tetrahydrofuranyl, tetrahydrothiophenyl pyrrolidinyl, piperidinyl, pyrrolinyl, tetrahydroquinolinyl, tetrahydroisoquinolinyl, decahydroquinolinyl, oxazolidinyl, piperazinyl, dioxanyl, dioxolanyl, diazepinyl, oxazepinyl, thiazepinyl, morpholinyl, and quinuclidinyl. The terms “heterocycle,” “heterocyclyl,” “heterocyclyl ring,” “heterocyclic group,” “heterocyclic moiety,” and “heterocyclic radical,” are used interchangeably herein, and also include groups in which a heterocyclyl ring is fused to one or more aryl, heteroaryl, or cycloaliphatic rings, such as indolinyl, 3H-indolyl, chromanyl, phenanthridinyl, or tetrahydroquinolinyl, where the radical or point of attachment is on the heterocyclyl ring. A heterocyclyl group may be mono- or bicyclic. The term “heterocyclylalkyl” refers to an alkyl group substituted by a heterocyclyl, wherein the alkyl and heterocyclyl portions independently are optionally substituted.

[0027] Intraperitoneal: The phrases “intraperitoneal administration” and “administered intraperitonealy” as used herein have their art-understood meaning referring to administration of a compound or composition into the peritoneum of a subject.

[0028] In vitro: As used herein, the term “in vitro” refers to events that occur in an artificial environment, e.g., in a test tube or reaction vessel, in cell culture, etc., rather than within an organism (e.g., animal, plant, and/or microbe).

[0029] In vivo: As used herein, the term “in vivo” refers to events that occur within an organism (e.g., animal, plant, and/or microbe).

[0030] Lower alkyl: The term “lower alkyl” refers to a C₁₋₄ straight or branched alkyl group. Exemplary lower alkyl groups are methyl, ethyl, propyl, isopropyl, butyl, isobutyl, and tert-butyl.

[0031] Lower haloalkyl: The term “lower haloalkyl” refers to a C₁₋₄ straight or branched alkyl group that is substituted with one or more halogen atoms.

[0032] Optionally substituted: As described herein, compounds of the invention may contain “optionally substituted” moieties. In general, the term “substituted,” whether preceded by the term “optionally” or not, means that one or more hydrogens of the designated moiety are replaced with a suitable substituent. Unless otherwise indicated, an “optionally substituted” group may have a suitable substituent at each substitutable position of the group, and when more than one position in any given structure may be substituted with more than one substituent selected from a specified group, the substituent may be either the same or different at every position. Combinations of substituents envisioned by this invention are preferably those that result in the formation of stable or chemically feasible compounds. The term “stable,” as used herein, refers to compounds that are not substantially altered when subjected to conditions to allow for their production, detection, and, in certain embodiments, their recovery, purification, and use for one or more of the purposes disclosed herein.

[0033] Suitable monovalent substituents on a substitutable carbon atom of an “optionally substituted” group are independently halogen; —(CH₂)₀₋₄R^{∘}; —(CH₂)₀₋₄OR^{∘}; —O(CH₂)₀₋₄R^{∘}, —O—(CH₂)₀₋₄C(O)OR^{∘}; —(CH₂)₀₋₄CH(OR^{∘})₂; —(CH₂)₀₋₄SR^{∘}; —(CH₂)₀₋₄Ph, which may be substituted with R^{∘}; —(CH₂)₀₋₄O(CH₂)₀₋₁Ph which may be substituted with R^{∘}; —CH═CHPh, which may be substituted with R^{∘}; —(CH₂)₀₋₄O(CH₂)₀₋₁-pyridyl which may be substituted with R^{∘}; —NO₂; —CN; —N₃; —(CH₂)₀₋₄N(R^{∘})₂; —(CH₂)₀₋₄N(R^{∘})C(O)R^{∘}; —N(R^{∘})C(S)R^{∘}; —(CH₂)₀₋₄N(R^{∘})C(O)NR^{∘}₂; —N(R^{∘})C(S)NR^{∘}₂; —(CH₂)₀₋₄N(R^{∘})C(O)OR^{∘}; —N(R^{∘})N(R^{∘})C(O)R^{∘}; —N(R^{∘})N(R^{∘})C(O)NR^{∘}₂; —N(R^{∘})N(R^{∘})C(O)OR^{∘}; —(CH₂)₀₋₄C(O)R^{∘}; —C(S)R^{∘}; —(CH₂)₀₋₄C(O)OR^{∘}; —(CH₂)₀₋₄C(O)SR^{∘}; —(CH₂)₀₋₄C(O)OSiR^{∘}₃; —(CH₂)₀₋₄OC(O)R^{∘}; —OC(O)(CH₂)₀₋₄SR—, SC(S)SR^{∘}; —(CH₂)₀₋₄SC(O)R^{∘}; —(CH₂)₀₋₄C(O)NR^{∘}₂; —C(S)NR^{∘}₂; —C(S)SR^{∘}; —SC(S)SR^{∘}, —(CH₂)₀₋₄OC(O)NR^{∘}₂; —C(O)N(OR^{∘})R^{∘}; —C(O)C(O)R^{∘}; —C(O)CH₂C(O)R^{∘}; —C(NOR^{∘})R^{∘}; —(CH₂)₀₋₄SSR^{∘}; —(CH₂)₀₋₄S(O)₂R^{∘}; —(CH₂)₀₋₄S(O)₂OR^{∘}; —(CH₂)₀₋₄OS(O)₂R^{∘}; —S(O)₂NR^{∘}₂; —(CH₂)₀₋₄S(O)R^{∘}; —N(R^{∘})S(O)₂NR^{∘}₂; —N(R^{∘})S(O)₂R^{∘}; —N(OR^{∘})R^{∘}; —C(NH)NR^{∘}₂; —P(O)₂R^{∘}; —P(O)R^{∘}₂; —OP(O)R^{∘}₂; —OP(O)(OR^{∘})₂; —SiR^{∘}₃; —(C₁₋₄ straight or branched alkylene)O—N(R^{∘})₂; or —(C₁₋₄ straight or branched alkylene)C(O)O—N(R^{∘})₂, wherein each R^{∘} may be substituted as defined below and is independently hydrogen, C₁₋₆ aliphatic, —CH₂Ph, —O(CH₂)₀₋₁Ph, —CH₂-(5-6 membered heteroaryl ring), or a 5-6-membered saturated, partially unsaturated, or aryl ring having 0-4 heteroatoms independently selected from nitrogen, oxygen, or sulfur, or, notwithstanding the definition above, two independent occurrences of R^{∘}, taken together with their intervening atom(s), form a 3-12-membered saturated, partially unsaturated, or aryl mono- or bicyclic ring having 0-4 heteroatoms independently selected from nitrogen, oxygen, or sulfur, which may be substituted as defined below.

[0034] Suitable monovalent substituents on R^{∘} (or the ring formed by taking two independent occurrences of R^{∘} together with their intervening atoms), are independently halogen, —(CH₂)₀₋₂R^{•}, -(haloR^{•}), —(CH₂)₀₋₂OH, —(CH₂)₀₋₂OR^{•}, —(CH₂)₀₋₂CH(OR^{•})₂; —O(haloR^{•}), —CN, —N₃, —(CH₂)₀₋₂C(O)R^{•}, —(CH₂)₀₋₂C(O)OH, —(CH₂)₀₋₂C(O)OR^{•}, —(CH₂)₀₋₂SR^{•}, —(CH₂)₀₋₂SH, —(CH₂)₀₋₂NH₂, —(CH₂)₀₋₂NHR^{•}, —(CH₂)₀₋₂NR′2, —NO₂, —SiR^{•}₃, —OSiR^{•}₃, —C(O)SR^{•}, —(C₁₋₄ straight or branched alkylene)C(O)OR^{•}, or —SSR^{•} wherein each R^{•} is unsubstituted or where preceded by “halo” is substituted only with one or more halogens, and is independently selected from C₁₋₄ aliphatic, —CH₂Ph, —O(CH₂)₀₋₁Ph, or a 5-6-membered saturated, partially unsaturated, or aryl ring having 0-4 heteroatoms independently selected from nitrogen, oxygen, or sulfur. Suitable divalent substituents on a saturated carbon atom of R^{∘} include ═O and ═S.

[0035] Suitable divalent substituents on a saturated carbon atom of an “optionally substituted” group include the following: ═O, ═S, ═NNR*2, ═NNHC(O)R*, ═NNHC(O)OR*, ═NNHS(O)₂R*, ═NR*, ═NOR*, —O(C(R*₂))₂-3O—, or —S(C(R*₂))₂-3S—, wherein each independent occurrence of R* is selected from hydrogen, C₁₋₆ aliphatic which may be substituted as defined below, or an unsubstituted 5-6-membered saturated, partially unsaturated, or aryl ring having 0-4 heteroatoms independently selected from nitrogen, oxygen, or sulfur. Suitable divalent substituents that are bound to vicinal substitutable carbons of an “optionally substituted” group include: —O(CR*₂)₂₋₃O—, wherein each independent occurrence of R* is selected from hydrogen, C₁₋₆ aliphatic which may be substituted as defined below, or an unsubstituted 5-6-membered saturated, partially unsaturated, or aryl ring having 0-4 heteroatoms independently selected from nitrogen, oxygen, or sulfur.

[0036] Suitable substituents on the aliphatic group of R^{•} include halogen, —R^{•}, -(haloR^{•}), —OH, —OR^{•}, —O(haloR^{•}), —CN, —C(O)OH, —C(O)OR^{•}, —NH₂, —NHR^{•}, —NR^{•}₂, or —NO₂, wherein each R^{•} is unsubstituted or where preceded by “halo” is substituted only with one or more halogens, and is independently C₁₋₄ aliphatic, —CH₂Ph, —O(CH₂)₀₋₁Ph, or a 5-6-membered saturated, partially unsaturated, or aryl ring having 0-4 heteroatoms independently selected from nitrogen, oxygen, or sulfur.

[0037] Suitable substituents on a substitutable nitrogen of an “optionally substituted” group include —R^{†}, —NR^{†}₂, —C(O)R^{†}, —C(O)OR^{†}, —C(O)C(O)R^{†}, —C(O)CH₂C(O)R^{†}, —S(O)₂R^{†}, —S(O)₂NR^{†}₂, —C(S)NR^{†}₂, —C(NH)NR^{†}₂, or —N(R^{†})S(O)₂R^{†}; wherein each R^{†} is independently hydrogen, C₁₋₆ aliphatic which may be substituted as defined below, unsubstituted —OPh, or an unsubstituted 5-6-membered saturated, partially unsaturated, or aryl ring having 0-4 heteroatoms independently selected from nitrogen, oxygen, or sulfur, or, notwithstanding the definition above, two independent occurrences of R^{†}, taken together with their intervening atom(s) form an unsubstituted 3-12-membered saturated, partially unsaturated, or aryl mono- or bicyclic ring having 0-4 heteroatoms independently selected from nitrogen, oxygen, or sulfur.

[0038] Suitable substituents on the aliphatic group of R^{†} are independently halogen, —R^{•}, -(haloR^{•}), —OH, —OR^{•}, —O(haloR^{•}), —CN, —C(O)OH, —C(O)OR^{•}, —NH₂, —NHR^{•}, —NR^{•}₂, or —NO₂, wherein each R^{•} is unsubstituted or where preceded by “halo” is substituted only with one or more halogens, and is independently C₁₋₄ aliphatic, —CH₂Ph, —O(CH₂)₀₋₁Ph, or a 5-6-membered saturated, partially unsaturated, or aryl ring having 0-4 heteroatoms independently selected from nitrogen, oxygen, or sulfur.

[0039] Oral: The phrases “oral administration” and “administered orally” as used herein have their art-understood meaning referring to administration by mouth of a compound or composition.

[0040] Parenteral: The phrases “parenteral administration” and “administered parenterally” as used herein have their art-understood meaning referring to modes of administration other than enteral and topical administration, usually by injection, and include, without limitation, intravenous, intramuscular, intraarterial, intrathecal, intracapsular, intraorbital, intracardiac, intradermal, intraperitoneal, transtracheal, subcutaneous, subcuticular, intraarticular, subcapsular, subarachnoid, intraspinal, and intrasternal injection and infusion.

[0041] Partially unsaturated: As used herein, the term “partially unsaturated” refers to a ring moiety that includes at least one double or triple bond. The term “partially unsaturated” is intended to encompass rings having multiple sites of unsaturation, but is not intended to include aryl or heteroaryl moieties, as herein defined.

[0042] Pharmaceutical composition: As used herein, the term “pharmaceutical composition” refers to an active agent, formulated together with one or more pharmaceutically acceptable carriers. In some embodiments, active agent is present in unit dose amount appropriate for administration in a therapeutic regimen that shows a statistically significant probability of achieving a predetermined therapeutic effect when administered to a relevant population. In some embodiments, pharmaceutical compositions may be specially formulated for administration in solid or liquid form, including those adapted for the following: oral administration, for example, drenches (aqueous or non-aqueous solutions or suspensions), tablets, e.g., those targeted for buccal, sublingual, and systemic absorption, boluses, powders, granules, pastes for application to the tongue; parenteral administration, for example, by subcutaneous, intramuscular, intravenous or epidural injection as, for example, a sterile solution or suspension, or sustained-release formulation; topical application, for example, as a cream, ointment, or a controlled-release patch or spray applied to the skin, lungs, or oral cavity; intravaginally or intrarectally, for example, as a pessary, cream, or foam; sublingually; ocularly; transdermally; or nasally, pulmonary, and to other mucosal surfaces.

[0043] Pharmaceutically acceptable: As used herein, the phrase “pharmaceutically acceptable” refers to those compounds, materials, compositions, and/or dosage forms which are, within the scope of sound medical judgment, suitable for use in contact with the tissues of human beings and animals without excessive toxicity, irritation, allergic response, or other problem or complication, commensurate with a reasonable benefit/risk ratio.

[0044] Pharmaceutically acceptable carrier: As used herein, the term “pharmaceutically acceptable carrier” means a pharmaceutically-acceptable material, composition or vehicle, such as a liquid or solid filler, diluent, excipient, or solvent encapsulating material, involved in carrying or transporting the subject compound from one organ, or portion of the body, to another organ, or portion of the body. Each carrier must be “acceptable” in the sense of being compatible with the other ingredients of the formulation and not injurious to the patient. Some examples of materials which can serve as pharmaceutically-acceptable carriers include: sugars, such as lactose, glucose and sucrose; starches, such as corn starch and potato starch; cellulose, and its derivatives, such as sodium carboxymethyl cellulose, ethyl cellulose and cellulose acetate; powdered tragacanth; malt; gelatin; talc; excipients, such as cocoa butter and suppository waxes; oils, such as peanut oil, cottonseed oil, safflower oil, sesame oil, olive oil, corn oil and soybean oil; glycols, such as propylene glycol; polyols, such as glycerin, sorbitol, mannitol and polyethylene glycol; esters, such as ethyl oleate and ethyl laurate; agar; buffering agents, such as magnesium hydroxide and aluminum hydroxide; alginic acid; pyrogen-free water; isotonic saline; Ringer's solution; ethyl alcohol; pH buffered solutions; polyesters, polycarbonates and/or polyanhydrides; and other nontoxic compatible substances employed in pharmaceutical formulations.

[0045] Pharmaceutically acceptable salt: The term “pharmaceutically acceptable salt”, as used herein, refers to salts of such compounds that are appropriate for use in pharmaceutical contexts, i.e., salts which are, within the scope of sound medical judgment, suitable for use in contact with the tissues of humans and lower animals without undue toxicity, irritation, allergic response and the like, and are commensurate with a reasonable benefit/risk ratio. Pharmaceutically acceptable salts are well known in the art. For example, S. M. Berge, et al. describes pharmaceutically acceptable salts in detail in J. Pharmaceutical Sciences, 66: 1-19 (1977). In some embodiments, pharmaceutically acceptable salt include, but are not limited to, nontoxic acid addition salts, which are salts of an amino group formed with inorganic acids such as hydrochloric acid, hydrobromic acid, phosphoric acid, sulfuric acid and perchloric acid or with organic acids such as acetic acid, maleic acid, tartaric acid, citric acid, succinic acid or malonic acid or by using other methods used in the art such as ion exchange. In some embodiments, pharmaceutically acceptable salts include, but are not limited to, adipate, alginate, ascorbate, aspartate, benzenesulfonate, benzoate, bisulfate, borate, butyrate, camphorate, camphorsulfonate, citrate, cyclopentanepropionate, digluconate, dodecylsulfate, ethanesulfonate, formate, fumarate, glucoheptonate, glycerophosphate, gluconate, hemisulfate, heptanoate, hexanoate, hydroiodide, 2-hydroxy-ethanesulfonate, lactobionate, lactate, laurate, lauryl sulfate, malate, maleate, malonate, methanesulfonate, 2-naphthalenesulfonate, nicotinate, nitrate, oleate, oxalate, palmitate, pamoate, pectinate, persulfate, 3-phenylpropionate, phosphate, picrate, pivalate, propionate, stearate, succinate, sulfate, tartrate, thiocyanate, p-toluenesulfonate, undecanoate, valerate salts, and the like. Representative alkali or alkaline earth metal salts include sodium, lithium, potassium, calcium, magnesium, and the like. In some embodiments, pharmaceutically acceptable salts include, when appropriate, nontoxic ammonium, quaternary ammonium, and amine cations formed using counterions such as halide, hydroxide, carboxylate, sulfate, phosphate, nitrate, alkyl having from 1 to 6 carbon atoms, sulfonate and aryl sulfonate.

[0046] Prodrug: A general, a “prodrug,” as that term is used herein and as is understood in the art, is an entity that, when administered to an organism, is metabolized in the body to deliver an active (e.g., therapeutic or diagnostic) agent of interest. Typically, such metabolism involves removal of at least one “prodrug moiety” so that the active agent is formed. Various forms of “prodrugs” are known in the art. For examples of such prodrug moieties, see:
[0047] a) Design of Prodrugs, edited by H. Bundgaard, (Elsevier, 1985) and Methods in Enzymology, 42:309-396, edited by K. Widder, et al. (Academic Press, 1985);
[0048] b) Prodrugs and Targeted Delivery, edited by by J. Rautio (Wiley, 2011);
[0049] c) Prodrugs and Targeted Delivery, edited by by J. Rautio (Wiley, 2011);
[0050] d) A Textbook of Drug Design and Development, edited by Krogsgaard-Larsen;
[0051] e) Bundgaard, Chapter 5 “Design and Application of Prodrugs”, by H. Bundgaard, p. 113-191 (1991);
[0052] f) Bundgaard, Advanced Drug Delivery Reviews, 8:1-38 (1992);
[0053] g) Bundgaard, et al., Journal of Pharmaceutical Sciences, 77:285 (1988); and
[0054] h) Kakeya, et al., Chem. Pharm. Bull., 32:692 (1984).

[0055] As with other compounds described herein, prodrugs may be provided in any of a variety of forms, e.g., crystal forms, salt forms etc. In some embodiments, prodrugs are provided as pharmaceutically acceptable salts thereof.

[0056] Protecting group: The term “protecting group,” as used herein, is well known in the art and includes those described in detail in Protecting Groups in Organic Synthesis, T. W. Greene and P. G. M. Wuts, 3^{rd} edition, John Wiley & Sons, 1999, the entirety of which is incorporated herein by reference. Also included are those protecting groups specially adapted for nucleoside and nucleotide chemistry described in Current Protocols in Nucleic Acid Chemistry, edited by Serge L. Beaucage et al. 06/2012, the entirety of Chapter 2 is incorporated herein by reference. Suitable amino-protecting groups include methyl carbamate, ethyl carbamate, 9-fluorenylmethyl carbamate (Fmoc), 9-(2-sulfo)fluorenylmethyl carbamate, 9-(2,7-dibromo)fluoroenylmethyl carbamate, 2,7-di-t-butyl-[9-(10,10-dioxo-10,10,10,10-tetrahydrothioxanthyl)]methyl carbamate (DBD-Tmoc), 4-methoxyphenacyl carbamate (Phenoc), 2,2,2-trichloroethyl carbamate (Troc), 2-trimethylsilylethyl carbamate (Teoc), 2-phenylethyl carbamate (hZ), 1-(1-adamantyl)-1-methylethyl carbamate (Adpoc), 1,1-dimethyl-2-haloethyl carbamate, 1,1-dimethyl-2,2-dibromoethyl carbamate (DB-t-BOC), 1,1-dimethyl-2,2,2-trichloroethyl carbamate (TCBOC), 1-methyl-1-(4-biphenylyl)ethyl carbamate (Bpoc), 1-(3,5-di-t-butylphenyl)-1-methylethyl carbamate (t-Bumeoc), 2-(2′- and 4′-pyridyl)ethyl carbamate (Pyoc), 2-(N,N-dicyclohexylcarboxamido)ethyl carbamate, t-butyl carbamate (BOC), 1-adamantyl carbamate (Adoc), vinyl carbamate (Voc), allyl carbamate (Alloc), 1-isopropylallyl carbamate (Ipaoc), cinnamyl carbamate (Coc), 4-nitrocinnamyl carbamate (Noc), 8-quinolyl carbamate, N-hydroxypiperidinyl carbamate, alkyldithio carbamate, benzyl carbamate (Cbz), p-methoxybenzyl carbamate (Moz), p-nitobenzyl carbamate, p-bromobenzyl carbamate, p-chlorobenzyl carbamate, 2,4-dichlorobenzyl carbamate, 4-methylsulfinylbenzyl carbamate (Msz), 9-anthrylmethyl carbamate, diphenylmethyl carbamate, 2-methylthioethyl carbamate, 2-methylsulfonylethyl carbamate, 2-(p-toluenesulfonyl)ethyl carbamate, [2-(1,3-dithianyl)]methyl carbamate (Dmoc), 4-methylthiophenyl carbamate (Mtpc), 2,4-dimethylthiophenyl carbamate (Bmpc), 2-phosphonioethyl carbamate (Peoc), 2-triphenylphosphonioisopropyl carbamate (Ppoc), 1,1-dimethyl-2-cyanoethyl carbamate, m-chloro-p-acyloxybenzyl carbamate, p-(dihydroxyboryl)benzyl carbamate, 5-benzisoxazolylmethyl carbamate, 2-(trifluoromethyl)-6-chromonylmethyl carbamate (Tcroc), m-nitrophenyl carbamate, 3,5-dimethoxybenzyl carbamate, o-nitrobenzyl carbamate, 3,4-dimethoxy-6-nitrobenzyl carbamate, phenyl(o-nitrophenyl)methyl carbamate, phenothiazinyl-(10)-carbonyl derivative, N′-p-toluenesulfonylaminocarbonyl derivative, N′-phenylaminothiocarbonyl derivative, t-amyl carbamate, S-benzyl thiocarbamate, p-cyanobenzyl carbamate, cyclobutyl carbamate, cyclohexyl carbamate, cyclopentyl carbamate, cyclopropylmethyl carbamate, p-decyloxybenzyl carbamate, 2,2-dimethoxycarbonylvinyl carbamate, o-(N,N-dimethylcarboxamido)benzyl carbamate, 1,1-dimethyl-3-(N,N-dimethylcarboxamido)propyl carbamate, 1,1-dimethylpropynyl carbamate, di(2-pyridyl)methyl carbamate, 2-furanylmethyl carbamate, 2-iodoethyl carbamate, isoborynl carbamate, isobutyl carbamate, isonicotinyl carbamate, p-(p′-methoxyphenylazo)benzyl carbamate, 1-methylcyclobutyl carbamate, 1-methylcyclohexyl carbamate, 1-methyl-1-cyclopropylmethyl carbamate, 1-methyl-1-(3,5-dimethoxyphenyl)ethyl carbamate, 1-methyl-1-(p-phenylazophenyl)ethyl carbamate, 1-methyl-1-phenylethyl carbamate, 1-methyl-1-(4-pyridyl)ethyl carbamate, phenyl carbamate, p-(phenylazo)benzyl carbamate, 2,4,6-tri-t-butylphenyl carbamate, 4-(trimethylammonium)benzyl carbamate, 2,4,6-trimethylbenzyl carbamate, formamide, acetamide, chloroacetamide, trichloroacetamide, trifluoroacetamide, phenylacetamide, 3-phenylpropanamide, picolinamide, 3-pyridylcarboxamide, N-benzoylphenylalanyl derivative, benzamide, p-phenylbenzamide, o-nitophenylacetamide, o-nitrophenoxyacetamide, acetoacetamide, (N′-dithiobenzyloxycarbonylamino)acetamide, 3-(p-hydroxyphenyl)propanamide, 3-(o-nitrophenyl)propanamide, 2-methyl-2-(o-nitrophenoxy)propanamide, 2-methyl-2-(o-phenylazophenoxy)propanamide, 4-chlorobutanamide, 3-methyl-3-nitrobutanamide, o-nitrocinnamide, N-acetylmethionine derivative, o-nitrobenzamide, o-(benzoyloxymethyl)benzamide, 4,5-diphenyl-3-oxazolin-2-one, N-phthalimide, N-dithiasuccinimide (Dts), N-2,3-diphenylmaleimide, N-2,5-dimethylpyrrole, N-1,1,4,4-tetramethyldisilylazacyclopentane adduct (STABASE), 5-substituted 1,3-dimethyl-1,3,5-triazacyclohexan-2-one, 5-substituted 1,3-dibenzyl-1,3,5-triazacyclohexan-2-one, 1-substituted 3,5-dinitro-4-pyridone, N-methylamine, N-allylamine, N-[2-(trimethylsilyl)ethoxy]methylamine (SEM), N-3-acetoxypropylamine, N-(1-isopropyl-4-nitro-2-oxo-3-pyroolin-3-yl)amine, quaternary ammonium salts, N-benzylamine, N-di(4-methoxyphenyl)methylamine, N-5-dibenzosuberylamine, N-triphenylmethylamine (Tr), N-[(4-methoxyphenyl)diphenylmethyl]amine (MMTr), N-9-phenylfluorenylamine (PhF), N-2,7-dichloro-9-fluorenylmethyleneamine, N-ferrocenylmethylamino (Fcm), N-2-picolylamino N′-oxide, N-1,1-dimethylthiomethyleneamine, N-benzylideneamine, N-p-methoxybenzylideneamine, N-diphenylmethyleneamine, N-[(2-pyridyl)mesityl]methyleneamine, N—(N′,N′-dimethylaminomethylene)amine, N,N′-isopropylidenediamine, N-p-nitrobenzylideneamine, N-salicylideneamine, N-5-chlorosalicylideneamine, N-(5-chloro-2-hydroxyphenyl)phenylmethyleneamine, N-cyclohexylideneamine, N-(5,5-dimethyl-3-oxo-1-cyclohexenyl)amine, N-borane derivative, N-diphenylborinic acid derivative, N-[phenyl(pentacarbonylchromium- or tungsten)carbonyl]amine, N-copper chelate, N-zinc chelate, N-nitroamine, N-nitrosoamine, amine N-oxide, diphenylphosphinamide (Dpp), dimethylthiophosphinamide (Mpt), diphenylthiophosphinamide (Ppt), dialkyl phosphoramidates, dibenzyl phosphoramidate, diphenyl phosphoramidate, benzenesulfenamide, o-nitrobenzenesulfenamide (Nps), 2,4-dinitrobenzenesulfenamide, pentachlorobenzenesulfenamide, 2-nitro-4-methoxybenzenesulfenamide, triphenylmethylsulfenamide, 3-nitropyridinesulfenamide (Npys), p-toluenesulfonamide (Ts), benzenesulfonamide, 2,3,6,-trimethyl-4-methoxybenzenesulfonamide (Mtr), 2,4,6-trimethoxybenzenesulfonamide (Mtb), 2,6-dimethyl-4-methoxybenzenesulfonamide (Pme), 2,3,5,6-tetramethyl-4-methoxybenzenesulfonamide (Mte), 4-methoxybenzenesulfonamide (Mbs), 2,4,6-trimethylbenzenesulfonamide (Mts), 2,6-dimethoxy-4-methylbenzenesulfonamide (iMds), 2,2,5,7,8-pentamethylchroman-6-sulfonamide (Pmc), methanesulfonamide (Ms), p-trimethylsilylethanesulfonamide (SES), 9-anthracenesulfonamide, 4-(4′,8′-dimethoxynaphthylmethyl)benzenesulfonamide (DNMBS), benzylsulfonamide, trifluoromethylsulfonamide, and phenacylsulfonamide.

[0057] Suitably protected carboxylic acids further include, but are not limited to, silyl-, alkyl-, alkenyl-, aryl-, and arylalkyl-protected carboxylic acids. Examples of suitable silyl groups include trimethylsilyl, triethylsilyl, t-butyldimethylsilyl, t-butyldiphenylsilyl, triisopropylsilyl, and the like. Examples of suitable alkyl groups include methyl, benzyl, p-methoxybenzyl, 3,4-dimethoxybenzyl, trityl, t-butyl, tetrahydropyran-2-yl. Examples of suitable alkenyl groups include allyl. Examples of suitable aryl groups include optionally substituted phenyl, biphenyl, or naphthyl. Examples of suitable arylalkyl groups include optionally substituted benzyl (e.g., p-methoxybenzyl (MPM), 3,4-dimethoxybenzyl, O-nitrobenzyl, p-nitrobenzyl, p-halobenzyl, 2,6-dichlorobenzyl, p-cyanobenzyl), and 2- and 4-picolyl.

[0058] Suitable hydroxyl protecting groups include methyl, methoxylmethyl (MOM), methylthiomethyl (MTM), t-butylthiomethyl, (phenyldimethylsilyl)methoxymethyl (SMOM), benzyloxymethyl (BOM), p-methoxybenzyloxymethyl (PMBM), (4-methoxyphenoxy)methyl (p-AOM), guaiacolmethyl (GUM), t-butoxymethyl, 4-pentenyloxymethyl (POM), siloxymethyl, 2-methoxyethoxymethyl (MEM), 2,2,2-trichloroethoxymethyl, bis(2-chloroethoxy)methyl, 2-(trimethylsilyl)ethoxymethyl (SEMOR), tetrahydropyranyl (THP), 3-bromotetrahydropyranyl, tetrahydrothiopyranyl, 1-methoxycyclohexyl, 4-methoxytetrahydropyranyl (MTHP), 4-methoxytetrahydrothiopyranyl, 4-methoxytetrahydrothiopyranyl S,S-dioxide, 1-[(2-chloro-4-methyl)phenyl]-4-methoxypiperidin-4-yl (CTMP), 1,4-dioxan-2-yl, tetrahydrofuranyl, tetrahydrothiofuranyl, 2,3,3a,4,5,6,7,7a-octahydro-7,8,8-trimethyl-4,7-methanobenzofuran-2-yl, 1-ethoxyethyl, 1-(2-chloroethoxy)ethyl, 1-methyl-1-methoxyethyl, 1-methyl-1-benzyloxyethyl, 1-methyl-1-benzyloxy-2-fluoroethyl, 2,2,2-trichloroethyl, 2-trimethylsilylethyl, 2-(phenylselenyl)ethyl, t-butyl, allyl, p-chlorophenyl, p-methoxyphenyl, 2,4-dinitrophenyl, benzyl, p-methoxybenzyl, 3,4-dimethoxybenzyl, o-nitrobenzyl, p-nitrobenzyl, p-halobenzyl, 2,6-dichlorobenzyl, p-cyanobenzyl, p-phenylbenzyl, 2-picolyl, 4-picolyl, 3-methyl-2-picolyl N-oxido, diphenylmethyl, p,p′-dinitrobenzhydryl, 5-dibenzosuberyl, triphenylmethyl, a-naphthyldiphenylmethyl, p-methoxyphenyldiphenylmethyl, di(p-methoxyphenyl)phenylmethyl, tri(p-methoxyphenyl)methyl, 4-(4′-bromophenacyloxyphenyl)diphenylmethyl, 4,4′,4″-tris(4,5-dichlorophthalimidophenyl)methyl, 4,4′,4″-tris(levulinoyloxyphenyl)methyl, 4,4′,4″-tris(benzoyloxyphenyl)methyl, 3-(imidazol-1-yl)bis(4′,4″-dimethoxyphenyl)methyl, 1,1-bis(4-methoxyphenyl)-1′-pyrenylmethyl, 9-anthryl, 9-(9-phenyl)xanthenyl, 9-(9-phenyl-10-oxo)anthryl, 1,3-benzodithiolan-2-yl, benzisothiazolyl S,S-dioxido, trimethylsilyl (TMS), triethylsilyl (TES), triisopropylsilyl (TIPS), dimethylisopropylsilyl (IPDMS), diethylisopropylsilyl (DEIPS), dimethylthexylsilyl, t-butyldimethylsilyl (TBDMS), t-butyldiphenylsilyl (TBDPS), tribenzylsilyl, tri-p-xylylsilyl, triphenylsilyl, diphenylmethylsilyl (DPMS), t-butylmethoxyphenylsilyl (TBMPS), formate, benzoylformate, acetate, chloroacetate, dichloroacetate, trichloroacetate, trifluoroacetate, methoxyacetate, triphenylmethoxyacetate, phenoxyacetate, p-chlorophenoxyacetate, 3-phenylpropionate, 4-oxopentanoate (levulinate), 4,4-(ethylenedithio)pentanoate (levulinoyldithioacetal), pivaloate, adamantoate, crotonate, 4-methoxycrotonate, benzoate, p-phenylbenzoate, 2,4,6-trimethylbenzoate (mesitoate), alkyl methyl carbonate, 9-fluorenylmethyl carbonate (Fmoc), alkyl ethyl carbonate, alkyl 2,2,2-trichloroethyl carbonate (Troc), 2-(trimethylsilyl)ethyl carbonate (TMSEC), 2-(phenylsulfonyl) ethyl carbonate (Psec), 2-(triphenylphosphonio) ethyl carbonate (Peoc), alkyl isobutyl carbonate, alkyl vinyl carbonate alkyl allyl carbonate, alkyl p-nitrophenyl carbonate, alkyl benzyl carbonate, alkyl p-methoxybenzyl carbonate, alkyl 3,4-dimethoxybenzyl carbonate, alkyl o-nitrobenzyl carbonate, alkyl p-nitrobenzyl carbonate, alkyl S-benzyl thiocarbonate, 4-ethoxy-1-napththyl carbonate, methyl dithiocarbonate, 2-iodobenzoate, 4-azidobutyrate, 4-nitro-4-methylpentanoate, o-(dibromomethyl)benzoate, 2-formylbenzenesulfonate, 2-(methylthiomethoxy)ethyl, 4-(methylthiomethoxy)butyrate, 2-(methylthiomethoxymethyl)benzoate, 2,6-dichloro-4-methylphenoxyacetate, 2,6-dichloro-4-(1,1,3,3-tetramethylbutyl)phenoxyacetate, 2,4-bis(1,1-dimethylpropyl)phenoxyacetate, chlorodiphenylacetate, isobutyrate, monosuccinoate, (E)-2-methyl-2-butenoate, o-(methoxycarbonyl)benzoate, a-naphthoate, nitrate, alkyl N,N,N′,N′-tetramethylphosphorodiamidate, alkyl N-phenylcarbamate, borate, dimethylphosphinothioyl, alkyl 2,4-dinitrophenylsulfenate, sulfate, methanesulfonate (mesylate), benzylsulfonate, and tosylate (Ts). For protecting 1,2- or 1,3-diols, the protecting groups include methylene acetal, ethylidene acetal, 1-t-butylethylidene ketal, 1-phenylethylidene ketal, (4-methoxyphenyl)ethylidene acetal, 2,2,2-trichloroethylidene acetal, acetonide, cyclopentylidene ketal, cyclohexylidene ketal, cycloheptylidene ketal, benzylidene acetal, p-methoxybenzylidene acetal, 2,4-dimethoxybenzylidene ketal, 3,4-dimethoxybenzylidene acetal, 2-nitrobenzylidene acetal, methoxymethylene acetal, ethoxymethylene acetal, dimethoxymethylene ortho ester, 1-methoxyethylidene ortho ester, l-ethoxyethylidine ortho ester, 1,2-dimethoxyethylidene ortho ester, a-methoxybenzylidene ortho ester, 1-(N,N-dimethylamino)ethylidene derivative, a-(N,N′-dimethylamino)benzylidene derivative, 2-oxacyclopentylidene ortho ester, di-t-butylsilylene group (DTBS), 1,3-(1,1,3,3-tetraisopropyldisiloxanylidene) derivative (TIPDS), tetra-t-butoxydisiloxane-1,3-diylidene derivative (TBDS), cyclic carbonates, cyclic boronates, ethyl boronate, and phenyl boronate.

[0059] In some embodiments, a hydroxyl protecting group is acetyl, t-butyl, t-butoxymethyl, methoxymethyl, tetrahydropyranyl, 1-ethoxyethyl, 1-(2-chloroethoxy)ethyl, 2-trimethylsilylethyl, p-chlorophenyl, 2,4-dinitrophenyl, benzyl, benzoyl, p-phenylbenzoyl, 2,6-dichlorobenzyl, diphenylmethyl, p-nitrobenzyl, triphenylmethyl (trityl), 4,4′-dimethoxytrityl, trimethylsilyl, triethylsilyl, t-butyldimethylsilyl, t-butyldiphenylsilyl, triphenylsilyl, triisopropylsilyl, benzoylformate, chloroacetyl, trichloroacetyl, trifiuoroacetyl, pivaloyl, 9-fluorenylmethyl carbonate, mesylate, tosylate, triflate, trityl, monomethoxytrityl (MMTr), 4,4′-dimethoxytrityl, (DMTr) and 4,4′,4″-trimethoxytrityl (TMTr), 2-cyanoethyl (CE or Cne), 2-(trimethylsilyl)ethyl (TSE), 2-(2-nitrophenyl)ethyl, 2-(4-cyanophenyl)ethyl 2-(4-nitrophenyl)ethyl (NPE), 2-(4-nitrophenylsulfonyl)ethyl, 3,5-dichlorophenyl, 2,4-dimethylphenyl, 2-nitrophenyl, 4-nitrophenyl, 2,4,6-trimethylphenyl, 2-(2-nitrophenyl)ethyl, butylthiocarbonyl, 4,4′,4″-tris(benzoyloxy)trityl, diphenylcarbamoyl, levulinyl, 2-(dibromomethyl)benzoyl (Dbmb), 2-(isopropylthiomethoxymethyl)benzoyl (Ptmt), 9-phenylxanthen-9-yl (pixyl) or 9-(p-methoxyphenyl)xanthine-9-yl (MOX). In some embodiments, each of the hydroxyl protecting groups is, independently selected from acetyl, benzyl, t-butyldimethylsilyl, t-butyldiphenylsilyl and 4,4′-dimethoxytrityl. In some embodiments, the hydroxyl protecting group is selected from the group consisting of trityl, monomethoxytrityl and 4,4′-dimethoxytrityl group.

[0060] In some embodiments, a phosphorous protecting group is a group attached to the internucleotide phosphorous linkage throughout oligonucleotide synthesis. In some embodiments, the phosphorous protecting group is attached to the sulfur atom of the internucleotide phosphorothioate linkage. In some embodiments, the phosphorous protecting group is attached to the oxygen atom of the internucleotide phosphorothioate linkage. In some embodiments, the phosphorous protecting group is attached to the oxygen atom of the internucleotide phosphate linkage. In some embodiments the phosphorous protecting group is 2-cyanoethyl (CE or Cne), 2-trimethylsilylethyl, 2-nitroethyl, 2-sulfonylethyl, methyl, benzyl, o-nitrobenzyl, ²-(p-nitrophenyl)ethyl (NPE or Npe), 2-phenylethyl, 3-(N-tert-butylcarboxamido)-1-propyl, 4-oxopentyl, 4-methylthio-1-butyl, 2-cyano-1,1-dimethylethyl, 4-N-methylaminobutyl, 3-(2-pyridyl)-1-propyl, 2-[N-methyl-N-(2-pyridyl)]aminoethyl, 2-(N-formyl,N-methyl)aminoethyl, 4-[N-methyl-N-(2,2,2-trifluoroacetyl)amino]butyl.

[0061] Protein: As used herein, the term “protein” refers to a polypeptide (i.e., a string of at least two amino acids linked to one another by peptide bonds). In some embodiments, proteins include only naturally-occurring amino acids. In some embodiments, proteins include one or more non-naturally-occurring amino acids (e.g., moieties that form one or more peptide bonds with adjacent amino acids). In some embodiments, one or more residues in a protein chain contain a non-amino-acid moiety (e.g., a glycan, etc). In some embodiments, a protein includes more than one polypeptide chain, for example linked by one or more disulfide bonds or associated by other means. In some embodiments, proteins contain L-amino acids, D-amino acids, or both; in some embodiments, proteins contain one or more amino acid modifications or analogs known in the art. Useful modifications include, e.g., terminal acetylation, amidation, methylation, etc. The term “peptide” is generally used to refer to a polypeptide having a length of less than about 100 amino acids, less than about 50 amino acids, less than 20 amino acids, or less than 10 amino acids. In some embodiments, proteins are antibodies, antibody fragments, biologically active portions thereof, and/or characteristic portions thereof.

[0062] Sample: As used herein, the term “sample” refers to a biological sample obtained or derived from a source of interest, as described herein. In some embodiments, a source of interest comprises an organism, such as an animal or human. In some embodiments, a biological sample comprises biological tissue or fluid. In some embodiments, a biological sample is or comprises bone marrow; blood; blood cells; ascites; tissue or fine needle biopsy samples; cell-containing body fluids; free floating nucleic acids; sputum; saliva; urine; cerebrospinal fluid, peritoneal fluid; pleural fluid; feces; lymph; gynecological fluids; skin swabs; vaginal swabs; oral swabs; nasal swabs; washings or lavages such as a ductal lavages or broncheoalveolar lavages; aspirates; scrapings; bone marrow specimens; tissue biopsy specimens; surgical specimens; feces, other body fluids, secretions, and/or excretions; and/or cells therefrom, etc. In some embodiments, a biological sample is or comprises cells obtained from an individual. In some embodiments, a sample is a “primary sample” obtained directly from a source of interest by any appropriate means. For example, in some embodiments, a primary biological sample is obtained by methods selected from the group consisting of biopsy (e.g., fine needle aspiration or tissue biopsy), surgery, collection of body fluid (e.g., blood, lymph, feces etc.), etc. In some embodiments, as will be clear from context, the term “sample” refers to a preparation that is obtained by processing (e.g., by removing one or more components of and/or by adding one or more agents to) a primary sample. For example, filtering using a semi-permeable membrane. Such a “processed sample” may comprise, for example nucleic acids or proteins extracted from a sample or obtained by subjecting a primary sample to techniques such as amplification or reverse transcription of mRNA, isolation and/or purification of certain components, etc.

[0063] Stereochemically isomeric forms: The phrase “stereochemically isomeric forms,” as used herein, refers to different compounds made up of the same atoms bonded by the same sequence of bonds but having different three-dimensional structures which are not interchangeable. In some embodiments of the invention, provided chemical compositions may be or include pure preparations of individual stereochemically isomeric forms of a compound; in some embodiments, provided chemical compositions may be or include mixtures of two or more stereochemically isomeric forms of the compound. In certain embodiments, such mixtures contain equal amounts of different stereochemically isomeric forms; in certain embodiments, such mixtures contain different amounts of at least two different stereochemically isomeric forms. In some embodiments, a chemical composition may contain all diastereomers and/or enantiomers of the compound. In some embodiments, a chemical composition may contain less than all diastereomers and/or enantiomers of a compound. In some embodiments, if a particular enantiomer of a compound of the present invention is desired, it may be prepared, for example, by asymmetric synthesis, or by derivation with a chiral auxiliary, where the resulting diastereomeric mixture is separated and the auxiliary group cleaved to provide the pure desired enantiomers. Alternatively, where the molecule contains a basic functional group, such as amino, diastereomeric salts are formed with an appropriate optically-active acid, and resolved, for example, by fractional crystallization.

[0064] Subject: As used herein, the term “subject” or “test subject” refers to any organism to which a provided compound or composition is administered in accordance with the present invention e.g., for experimental, diagnostic, prophylactic, and/or therapeutic purposes. Typical subjects include animals (e.g., mammals such as mice, rats, rabbits, non-human primates, and humans; insects; worms; etc.) and plants. In some embodiments, a subject may be suffering from, and/or susceptible to a disease, disorder, and/or condition.

[0065] Substantially: As used herein, the term “substantially” refers to the qualitative condition of exhibiting total or near-total extent or degree of a characteristic or property of interest. One of ordinary skill in the biological arts will understand that biological and chemical phenomena rarely, if ever, go to completion and/or proceed to completeness or achieve or avoid an absolute result. The term “substantially” is therefore used herein to capture the potential lack of completeness inherent in many biological and/or chemical phenomena.

[0066] Suffering from: An individual who is “suffering from” a disease, disorder, and/or condition has been diagnosed with and/or displays one or more symptoms of a disease, disorder, and/or condition.

[0067] Susceptible to: An individual who is “susceptible to” a disease, disorder, and/or condition is one who has a higher risk of developing the disease, disorder, and/or condition than does a member of the general public. In some embodiments, an individual who is susceptible to a disease, disorder and/or condition may not have been diagnosed with the disease, disorder, and/or condition. In some embodiments, an individual who is susceptible to a disease, disorder, and/or condition may exhibit symptoms of the disease, disorder, and/or condition. In some embodiments, an individual who is susceptible to a disease, disorder, and/or condition may not exhibit symptoms of the disease, disorder, and/or condition. In some embodiments, an individual who is susceptible to a disease, disorder, and/or condition will develop the disease, disorder, and/or condition. In some embodiments, an individual who is susceptible to a disease, disorder, and/or condition will not develop the disease, disorder, and/or condition.

[0068] Systemic: The phrases “systemic administration,” “administered systemically,” “peripheral administration,” and “administered peripherally” as used herein have their art-understood meaning referring to administration of a compound or composition such that it enters the recipient's system.

[0069] Tautomeric forms: The phrase “tautomeric forms,” as used herein, is used to describe different isomeric forms of organic compounds that are capable of facile interconversion. Tautomers may be characterized by the formal migration of a hydrogen atom or proton, accompanied by a switch of a single bond and adjacent double bond. In some embodiments, tautomers may result from prototropic tautomerism (i.e., the relocation of a proton). In some embodiments, tautomers may result from valence tautomerism (i.e., the rapid reorganization of bonding electrons). All such tautomeric forms are intended to be included within the scope of the present invention. In some embodiments, tautomeric forms of a compound exist in mobile equilibrium with each other, so that attempts to prepare the separate substances results in the formation of a mixture. In some embodiments, tautomeric forms of a compound are separable and isolatable compounds. In some embodiments of the invention, chemical compositions may be provided that are or include pure preparations of a single tautomeric form of a compound. In some embodiments of the invention, chemical compositions may be provided as mixtures of two or more tautomeric forms of a compound. In certain embodiments, such mixtures contain equal amounts of different tautomeric forms; in certain embodiments, such mixtures contain different amounts of at least two different tautomeric forms of a compound. In some embodiments of the invention, chemical compositions may contain all tautomeric forms of a compound. In some embodiments of the invention, chemical compositions may contain less than all tautomeric forms of a compound. In some embodiments of the invention, chemical compositions may contain one or more tautomeric forms of a compound in amounts that vary over time as a result of interconversion. In some embodiments of the invention, the tautomerism is keto-enol tautomerism. One of skill in the chemical arts would recognize that a keto-enol tautomer can be “trapped” (i.e., chemically modified such that it remains in the “enol” form) using any suitable reagent known in the chemical arts in to provide an enol derivative that may subsequently be isolated using one or more suitable techniques known in the art. Unless otherwise indicated, the present invention encompasses all tautomeric forms of relevant compounds, whether in pure form or in admixture with one another.

[0070] Therapeutic agent: As used herein, the phrase “therapeutic agent” refers to any agent that, when administered to a subject, has a therapeutic effect and/or elicits a desired biological and/or pharmacological effect. In some embodiments, a therapeutic agent is any substance that can be used to alleviate, ameliorate, relieve, inhibit, prevent, delay onset of, reduce severity of, and/or reduce incidence of one or more symptoms or features of a disease, disorder, and/or condition.

[0071] Therapeutically effective amount: As used herein, the term “therapeutically effective amount” means an amount of a substance (e.g., a therapeutic agent, composition, and/or formulation) that elicits a desired biological response when administered as part of a therapeutic regimen. In some embodiments, a therapeutically effective amount of a substance is an amount that is sufficient, when administered to a subject suffering from or susceptible to a disease, disorder, and/or condition, to treat, diagnose, prevent, and/or delay the onset of the disease, disorder, and/or condition. As will be appreciated by those of ordinary skill in this art, the effective amount of a substance may vary depending on such factors as the desired biological endpoint, the substance to be delivered, the target cell or tissue, etc. For example, the effective amount of compound in a formulation to treat a disease, disorder, and/or condition is the amount that alleviates, ameliorates, relieves, inhibits, prevents, delays onset of, reduces severity of and/or reduces incidence of one or more symptoms or features of the disease, disorder, and/or condition. In some embodiments, a therapeutically effective amount is administered in a single dose; in some embodiments, multiple unit doses are required to deliver a therapeutically effective amount.

[0072] Treat: As used herein, the term “treat,” “treatment,” or “treating” refers to any method used to partially or completely alleviate, ameliorate, relieve, inhibit, prevent, delay onset of, reduce severity of, and/or reduce incidence of one or more symptoms or features of a disease, disorder, and/or condition. Treatment may be administered to a subject who does not exhibit signs of a disease, disorder, and/or condition. In some embodiments, treatment may be administered to a subject who exhibits only early signs of the disease, disorder, and/or condition, for example for the purpose of decreasing the risk of developing pathology associated with the disease, disorder, and/or condition.

[0073] Unsaturated: The term “unsaturated,” as used herein, means that a moiety has one or more units of unsaturation.

[0074] Unit dose: The expression “unit dose” as used herein refers to an amount administered as a single dose and/or in a physically discrete unit of a pharmaceutical composition. In many embodiments, a unit dose contains a predetermined quantity of an active agent. In some embodiments, a unit dose contains an entire single dose of the agent. In some embodiments, more than one unit dose is administered to achieve a total single dose. In some embodiments, administration of multiple unit doses is required, or expected to be required, in order to achieve an intended effect. A unit dose may be, for example, a volume of liquid (e.g., an acceptable carrier) containing a predetermined quantity of one or more therapeutic agents, a predetermined amount of one or more therapeutic agents in solid form, a sustained release formulation or drug delivery device containing a predetermined amount of one or more therapeutic agents, etc. It will be appreciated that a unit dose may be present in a formulation that includes any of a variety of components in addition to the therapeutic agent(s). For example, acceptable carriers (e.g., pharmaceutically acceptable carriers), diluents, stabilizers, buffers, preservatives, etc., may be included as described infra. It will be appreciated by those skilled in the art, in many embodiments, a total appropriate daily dosage of a particular therapeutic agent may comprise a portion, or a plurality, of unit doses, and may be decided, for example, by the attending physician within the scope of sound medical judgment. In some embodiments, the specific effective dose level for any particular subject or organism may depend upon a variety of factors including the disorder being treated and the severity of the disorder; activity of specific active compound employed; specific composition employed; age, body weight, general health, sex and diet of the subject; time of administration, and rate of excretion of the specific active compound employed; duration of the treatment; drugs and/or additional therapies used in combination or coincidental with specific compound(s) employed, and like factors well known in the medical arts.

[0075] Wild-type: As used herein, the term “wild-type” has its art-understood meaning that refers to an entity having a structure and/or activity as found in nature in a “normal” (as contrasted with mutant, diseased, altered, etc) state or context. Those of ordinary skill in the art will appreciate that wild type genes and polypeptides often exist in multiple different forms (e.g., alleles).

[0076] Nucleic acid: The term “nucleic acid” includes any nucleotides, analogs thereof, and polymers thereof. The term “polynucleotide” as used herein refer to a polymeric form of nucleotides of any length, either ribonucleotides (RNA) or deoxyribonucleotides (DNA). These terms refer to the primary structure of the molecules and, thus, include double- and single-stranded DNA, and double- and single-stranded RNA. These terms include, as equivalents, analogs of either RNA or DNA made from nucleotide analogs and modified polynucleotides such as, though not limited to, methylated, protected and/or capped nucleotides or polynucleotides. The terms encompass poly- or oligo-ribonucleotides (RNA) and poly- or oligo-deoxyribonucleotides (DNA); RNA or DNA derived from N-glycosides or C-glycosides of nucleobases and/or modified nucleobases; nucleic acids derived from sugars and/or modified sugars; and nucleic acids derived from phosphate bridges and/or modified phosphorus-atom bridges (also referred to herein as “internucleotide linkages”). The term encompasses nucleic acids containing any combinations of nucleobases, modified nucleobases, sugars, modified sugars, phosphate bridges or modified phosphorus atom bridges. Examples include, and are not limited to, nucleic acids containing ribose moieties, the nucleic acids containing deoxy-ribose moieties, nucleic acids containing both ribose and deoxyribose moieties, nucleic acids containing ribose and modified ribose moieties. The prefix poly- refers to a nucleic acid containing 2 to about 10,000 nucleotide monomer units and wherein the prefix oligo- refers to a nucleic acid containing 2 to about 200 nucleotide monomer units.

[0077] Nucleotide: The term “nucleotide” as used herein refers to a monomeric unit of a polynucleotide that consists of a heterocyclic base, a sugar, and one or more phosphate groups or phosphorus-containing internucleotidic linkages. The naturally occurring bases, (guanine, (G), adenine, (A), cytosine, (C), thymine, (T), and uracil (U)) are derivatives of purine or pyrimidine, though it should be understood that naturally and non-naturally occurring base analogs are also included. The naturally occurring sugar is the pentose (five-carbon sugar) deoxyribose (which forms DNA) or ribose (which forms RNA), though it should be understood that naturally and non-naturally occurring sugar analogs are also included. Nucleotides are linked via internucleotidic linkages to form nucleic acids, or polynucleotides. Many internucleotidic linkages are known in the art (such as, though not limited to, phosphate, phosphorothioates, boranophosphates and the like). Artificial nucleic acids include PNAs (peptide nucleic acids), phosphotriesters, phosphorothionates, H-phosphonates, phosphoramidates, boranophosphates, methylphosphonates, phosphonoacetates, thiophosphonoacetates and other variants of the phosphate backbone of native nucleic acids, such as those described herein.

[0078] Nucleoside: The term “nucleoside” refers to a moiety wherein a nucleobase or a modified nucleobase is covalently bound to a sugar or modified sugar.

[0079] Sugar: The term “sugar” refers to a monosaccharide in closed and/or open form. Sugars include, but are not limited to, ribose, deoxyribose, pentofuranose, pentopyranose, and hexopyranose moieties. As used herein, the term also encompasses structural analogs used in lieu of conventional sugar molecules, such as glycol, polymer of which forms the backbone of the nucleic acid analog, glycol nucleic acid (“GNA”).

[0080] Modified sugar: The term “modified sugar” refers to a moiety that can replace a sugar. The modified sugar mimics the spatial arrangement, electronic properties, or some other physicochemical property of a sugar.

[0081] Nucleobase: The term “nucleobase” refers to the parts of nucleic acids that are involved in the hydrogen-bonding that binds one nucleic acid strand to another complementary strand in a sequence specific manner. The most common naturally-occurring nucleobases are adenine (A), guanine (G), uracil (U), cytosine (C), and thymine (T). In some embodiments, the naturally-occurring nucleobases are modified adenine, guanine, uracil, cytosine, or thymine. In some embodiments, the naturally-occurring nucleobases are methylated adenine, guanine, uracil, cytosine, or thymine. In some embodiments, a nucleobase is a “modified nucleobase,” e.g., a nucleobase other than adenine (A), guanine (G), uracil (U), cytosine (C), and thymine (T). In some embodiments, the modified nucleobases are methylated adenine, guanine, uracil, cytosine, or thymine. In some embodiments, the modified nucleobase mimics the spatial arrangement, electronic properties, or some other physicochemical property of the nucleobase and retains the property of hydrogen-bonding that binds one nucleic acid strand to another in a sequence specific manner. In some embodiments, a modified nucleobase can pair with all of the five naturally occurring bases (uracil, thymine, adenine, cytosine, or guanine) without substantially affecting the melting behavior, recognition by intracellular enzymes or activity of the oligonucleotide duplex.

[0082] Chiral ligand: The term “chiral ligand” or “chiral auxiliary” refers to a moiety that is chiral and can be incorporated into a reaction so that the reaction can be carried out with certain stereoselectivity.

[0083] Condensing reagent: In a condensation reaction, the term “condensing reagent” refers to a reagent that activates a less reactive site and renders it more susceptible to attack by another reagent. In some embodiments, such another reagent is a nucleophile.

[0084] Blocking group: The term “blocking group” refers to a group that masks the reactivity of a functional group. The functional group can be subsequently unmasked by removal of the blocking group. In some embodiments, a blocking group is a protecting group.

[0085] Moiety: The term “moiety” refers to a specific segment or functional group of a molecule. Chemical moieties are often recognized chemical entities embedded in or appended to a molecule.

[0086] Solid support: The term “solid support” refers to any support which enables synthesis of nucleic acids. In some embodiments, the term refers to a glass or a polymer, that is insoluble in the media employed in the reaction steps performed to synthesize nucleic acids, and is derivatized to comprise reactive groups. In some embodiments, the solid support is Highly Cross-linked Polystyrene (HCP) or Controlled Pore Glass (CPG). In some embodiments, the solid support is Controlled Pore Glass (CPG). In some embodiments, the solid support is hybrid support of Controlled Pore Glass (CPG) and Highly Cross-linked Polystyrene (HCP).

[0087] Linking moiety: The term “linking moiety” refers to any moiety optionally positioned between the terminal nucleoside and the solid support or between the terminal nucleoside and another nucleoside, nucleotide, or nucleic acid.

[0088] DNA molecule: A “DNA molecule” refers to the polymeric form of deoxyribonucleotides (adenine, guanine, thymine, or cytosine) in its either single stranded form or a double-stranded helix. This term refers only to the primary and secondary structure of the molecule, and does not limit it to any particular tertiary forms. Thus, this term includes double-stranded DNA found, inter alia, in linear DNA molecules (e.g., restriction fragments), viruses, plasmids, and chromosomes. In discussing the structure of particular double-stranded DNA molecules, sequences can be described herein according to the normal convention of giving only the sequence in the 5′ to 3′ direction along the non-transcribed strand of DNA (i.e., the strand having a sequence homologous to the mRNA).

[0089] Coding sequence: A DNA “coding sequence” or “coding region” is a double-stranded DNA sequence which is transcribed and translated into a polypeptide in vivo when placed under the control of appropriate expression control sequences. The boundaries of the coding sequence (the “open reading frame” or “ORF”) are determined by a start codon at the 5′ (amino) terminus and a translation stop codon at the 3′(carboxyl) terminus. A coding sequence can include, but is not limited to, prokaryotic sequences, cDNA from eukaryotic mRNA, genomic DNA sequences from eukaryotic (e.g., mammalian) DNA, and synthetic DNA sequences. A polyadenylation signal and transcription termination sequence is, usually, be located 3′ to the coding sequence. The term “non-coding sequence” or “non-coding region” refers to regions of a polynucleotide sequence that are not translated into amino acids (e.g. 5′ and 3′ un-translated regions).

[0090] Reading frame: The term “reading frame” refers to one of the six possible reading frames, three in each direction, of the double stranded DNA molecule. The reading frame that is used determines which codons are used to encode amino acids within the coding sequence of a DNA molecule.

[0091] Antisense: As used herein, an “antisense” nucleic acid molecule comprises a nucleotide sequence which is complementary to a “sense” nucleic acid encoding a protein, e.g., complementary to the coding strand of a double-stranded cDNA molecule, complementary to an mRNA sequence or complementary to the coding strand of a gene. Accordingly, an antisense nucleic acid molecule can associate via hydrogen bonds to a sense nucleic acid molecule.

[0092] Wobble position: As used herein, a “wobble position” refers to the third position of a codon. Mutations in a DNA molecule within the wobble position of a codon, in some embodiments, result in silent or conservative mutations at the amino acid level. For example, there are four codons that encode Glycine, i.e., GGU, GGC, GGA and GGG, thus mutation of any wobble position nucleotide, to any other nucleotide selected from A, U, C and G, does not result in a change at the amino acid level of the encoded protein and, therefore, is a silent substitution.

[0093] Silent substitution: a “silent substitution” or “silent mutation” is one in which a nucleotide within a codon is modified, but does not result in a change in the amino acid residue encoded by the codon. Examples include mutations in the third position of a codon, as well in the first position of certain codons such as in the codon “CGG” which, when mutated to AGG, still encodes Arg.

[0094] Gene: The terms “gene,” “recombinant gene” and “gene construct” as used herein, refer to a DNA molecule, or portion of a DNA molecule, that encodes a protein or a portion thereof. The DNA molecule can contain an open reading frame encoding the protein (as exon sequences) and can further include intron sequences. The term “intron” as used herein, refers to a DNA sequence present in a given gene which is not translated into protein and is found in some, but not all cases, between exons. It can be desirable for the gene to be operably linked to, (or it can comprise), one or more promoters, enhancers, repressors and/or other regulatory sequences to modulate the activity or expression of the gene, as is well known in the art.

[0095] Complementary DNA: As used herein, a “complementary DNA” or “cDNA” includes recombinant polynucleotides synthesized by reverse transcription of mRNA and from which intervening sequences (introns) have been removed.

[0096] Homology: “Homology” or “identity” or “similarity” refers to sequence similarity between two nucleic acid molecules. Homology and identity can each be determined by comparing a position in each sequence which can be aligned for purposes of comparison. When an equivalent position in the compared sequences is occupied by the same base, then the molecules are identical at that position; when the equivalent site occupied by the same or a similar nucleic acid residue (e.g., similar in steric and/or electronic nature), then the molecules can be referred to as homologous (similar) at that position. Expression as a percentage of homology/similarity or identity refers to a function of the number of identical or similar nucleic acids at positions shared by the compared sequences. A sequence which is “unrelated” or “non-homologous” shares less than 40% identity, less than 35% identity, less than 30% identity, or less than 25% identity with a sequence described herein. In comparing two sequences, the absence of residues (amino acids or nucleic acids) or presence of extra residues also decreases the identity and homology/similarity.

[0097] In some embodiments, the term “homology” describes a mathematically based comparison of sequence similarities which is used to identify genes with similar functions or motifs. The nucleic acid sequences described herein can be used as a “query sequence” to perform a search against public databases, for example, to identify other family members, related sequences or homologs. In some embodiments, such searches can be performed using the NBLAST and XBLAST programs (version 2.0) of Altschul, et al. (1990) J. Mol. Biol. 215:403-10. In some embodiments, BLAST nucleotide searches can be performed with the NBLAST program, score=100, wordlength=12 to obtain nucleotide sequences homologous to nucleic acid molecules of the invention. In some embodiments, to obtain gapped alignments for comparison purposes, Gapped BLAST can be utilized as described in Altschul et al., (1997) Nucleic Acids Res. 25(17):3389-3402. When utilizing BLAST and Gapped BLAST programs, the default parameters of the respective programs (e.g., XBLAST and BLAST) can be used (See www.ncbi.nlm.nih.gov).

[0098] Identity: As used herein, “identity” means the percentage of identical nucleotide residues at corresponding positions in two or more sequences when the sequences are aligned to maximize sequence matching, i.e., taking into account gaps and insertions. Identity can be readily calculated by known methods, including but not limited to those described in (Computational Molecular Biology, Lesk, A. M., ed., Oxford University Press, New York, 1988; Biocomputing: Informatics and Genome Projects, Smith, D. W., ed., Academic Press, New York, 1993; Computer Analysis of Sequence Data, Part I, Griffin, A. M., and Griffin, H. G., eds., Humana Press, New Jersey, 1994; Sequence Analysis in Molecular Biology, von Heinje, G., Academic Press, 1987; and Sequence Analysis Primer, Gribskov, M. and Devereux, J., eds., M Stockton Press, New York, 1991; and Carillo, H., and Lipman, D., SIAM J. Applied Math., 48: 1073 (1988). Methods to determine identity are designed to give the largest match between the sequences tested. Moreover, methods to determine identity are codified in publicly available computer programs. Computer program methods to determine identity between two sequences include, but are not limited to, the GCG program package (Devereux, J., et al., Nucleic Acids Research 12(1): 387 (1984)), BLASTP, BLASTN, and FASTA (Altschul, S. F. et al., J. Molec. Biol. 215: 403-410 (1990) and Altschul et al. Nuc. Acids Res. 25: 3389-3402 (1997)). The BLAST X program is publicly available from NCBI and other sources (BLAST Manual, Altschul, S., et al., NCBI NLM NIH Bethesda, Md. 20894; Altschul, S., et al., J. Mol. Biol. 215: 403-410 (1990). The well-known Smith Waterman algorithm can also be used to determine identity.

[0099] Heterologous: A “heterologous” region of a DNA sequence is an identifiable segment of DNA within a larger DNA sequence that is not found in association with the larger sequence in nature. Thus, when the heterologous region encodes a mammalian gene, the gene can usually be flanked by DNA that does not flank the mammalian genomic DNA in the genome of the source organism. Another example of a heterologous coding sequence is a sequence where the coding sequence itself is not found in nature (e.g., a cDNA where the genomic coding sequence contains introns or synthetic sequences having codons or motifs different than the unmodified gene). Allelic variations or naturally-occurring mutational events do not give rise to a heterologous region of DNA as defined herein.

[0100] Transition mutation: The term “transition mutations” refers to base changes in a DNA sequence in which a pyrimidine (cytidine (C) or thymidine (T) is replaced by another pyrimidine, or a purine (adenosine (A) or guanosine (G) is replaced by another purine.

[0101] Transversion mutation: The term “transversion mutations” refers to base changes in a DNA sequence in which a pyrimidine (cytidine (C) or thymidine (T) is replaced by a purine (adenosine (A) or guanosine (G), or a purine is replaced by a pyrimidine.

[0102] Oligonucleotide: the term “oligonucleotide” refers to a polymer or oligomer of nucleotide monomers, containing any combination of nucleobases, modified nucleobases, sugars, modified sugars, phosphate bridges, or modified phosphorus atom bridges (also referred to herein as “internucleotidic linkage”, defined further herein).

[0103] Oligonucleotides can be single-stranded or double-stranded. As used herein, the term “oligonucleotide strand” encompasses a single-stranded oligonucleotide. A single-stranded oligonucleotide can have double-stranded regions and a double-stranded oligonucleotide can have single-stranded regions. Exemplary oligonucleotides include, but are not limited to structural genes, genes including control and termination regions, self-replicating systems such as viral or plasmid DNA, single-stranded and double-stranded siRNAs and other RNA interference reagents (RNAi agents or iRNA agents), shRNA, antisense oligonucleotides, ribozymes, microRNAs, microRNA mimics, supermirs, aptamers, antimirs, antagomirs, Ul adaptors, triplex-forming oligonucleotides, G-quadruplex oligonucleotides, RNA activators, immuno-stimulatory oligonucleotides, and decoy oligonucleotides.

[0104] Double-stranded and single-stranded oligonucleotides that are effective in inducing RNA interference are also referred to as siRNA, RNAi agent, or iRNA agent, herein. In some embodiments, these RNA interference inducing oligonucleotides associate with a cytoplasmic multi-protein complex known as RNAi-induced silencing complex (RISC). In many embodiments, single-stranded and double-stranded RNAi agents are sufficiently long that they can be cleaved by an endogenous molecule, e.g., by Dicer, to produce smaller oligonucleotides that can enter the RISC machinery and participate in RISC mediated cleavage of a target sequence, e.g. a target mRNA.

[0105] Oligonucleotides of the present invention can be of various lengths. In particular embodiments, oligonucleotides can range from about 2 to about 200 nucleotides in length. In various related embodiments, oligonucleotides, single-stranded, double-stranded, and triple-stranded, can range in length from about 4 to about 10 nucleotides, from about 10 to about 50 nucleotides, from about 20 to about 50 nucleotides, from about 15 to about 30 nucleotides, from about 20 to about 30 nucleotides in length. In some embodiments, the oligonucleotide is from about 9 to about 39 nucleotides in length. In some embodiments, the oligonucleotide is at least 4 nucleotides in length. In some embodiments, the oligonucleotide is at least 5 nucleotides in length. In some embodiments, the oligonucleotide is at least 6 nucleotides in length. In some embodiments, the oligonucleotide is at least 7 nucleotides in length. In some embodiments, the oligonucleotide is at least 8 nucleotides in length. In some embodiments, the oligonucleotide is at least 9 nucleotides in length. In some embodiments, the oligonucleotide is at least 10 nucleotides in length. In some embodiments, the oligonucleotide is at least 11 nucleotides in length. In some embodiments, the oligonucleotide is at least 12 nucleotides in length. In some embodiments, the oligonucleotide is at least 15 nucleotides in length. In some embodiments, the oligonucleotide is at least 20 nucleotides in length. In some embodiments, the oligonucleotide is at least 25 nucleotides in length. In some embodiments, the oligonucleotide is at least 30 nucleotides in length. In some embodiments, the oligonucleotide is a duplex of complementary strands of at least 18 nucleotides in length. In some embodiments, the oligonucleotide is a duplex of complementary strands of at least 21 nucleotides in length.

[0106] Internucleotidic linkage: As used herein, the phrase “internucleotidic linkage” refers generally to the phosphorus-containing linkage between nucleotide units of an oligonucleotide, and is interchangeable with “inter-sugar linkage” and “phosphorus atom bridge,” as used above and herein. In some embodiments, an internucleotidic linkage is a phosphodiester linkage, as found in naturally occurring DNA and RNA molecules. In some embodiments, an internucleotidic linkage is a “modified internucleotidic linkage” wherein each oxygen atom of the phosphodiester linkage is optionally and independently replaced by an organic or inorganic moiety. In some embodiments, such an organic or inorganic moiety is selected from but not limited to ═S, ═Se, ═NR′, —SR′, —SeR′, —N(R′)₂, B(R′)₃, —S—, —Se—, and —N(R′)—, wherein each R′ is independently as defined and described below. In some embodiments, an internucleotidic linkage is a phosphotriester linkage, phosphorothioate diester linkage

[chemical structure]

or modified phosphorothioate triester linkage. It is understood by a person of ordinary skill in the art that the internucleotidic linkage may exist as an anion or cation at a given pH due to the existence of acid or base moieties in the linkage.

[0107] Unless otherwise specified, when used with an oligonucleotide sequence, each of s, s1, s2, s3, s4 s5, s6 and s7 independently represents the following modified internucleotidic linkage as illustrated in Table 1, below.

TABLE 1
Exemplary Modified Internucleotidic Linkage.

| Sym- | |
|---|---|
| bol | Modified Internucleotidic Linkage |
| s | phophorothioate [chemical structure] |
| s1 | [chemical structure] |
| s2 | [chemical structure] |
| s3 | [chemical structure] |
| s4 | [chemical structure] |
| s5 | [chemical structure] |
| s6 | [chemical structure] |
| s7 | [chemical structure] |
| s8 | [chemical structure] |
| s9 | [chemical structure] |
| s10 | [chemical structure] |
| s11 | [chemical structure] |
| s12 | [chemical structure] |
| s13 | [chemical structure] |
| s14 | [chemical structure] |
| s15 | [chemical structure] |
| s16 | [chemical structure] |
| s17 | [chemical structure] |
| s18 | [chemical structure] |

[0108] For instance, (Rp, Sp)-ATsCs1GA has 1) a phosphorothioate internucleotidic linkage

[chemical structure]

between T and C; and 2) a phosphorothioate triester internucleotidic linkage having the structure of

[chemical structure]

between C and G. Unless otherwise specified, the Rp/Sp designations preceding an oligonucleotide sequence describe the configurations of chiral linkage phosphorus atoms in the internucleotidic linkages sequentially from 5′ to 3′ of the oligonucleotide sequence. For instance, in (Rp, Sp)-ATsCs1GA, the phosphorus in the “s” linkage between T and C has Rp configuration and the phosphorus in “s1” linkage between C and G has Sp configuration. In some embodiments, “All-(Rp)” or “All-(Sp)” is used to indicate that all chiral linkage phosphorus atoms in oligonucleotide have the same Rp or Sp configuration, respectively. For instance, All-(Rp)-GsCsCsTsCsAsGsTsCsTsGsCsTsTsCsGsCsAsCsC (SEQ ID NO: 106) indicates that all the chiral linkage phosphorus atoms in the oligonucleotide have Rp configuration; All-(Sp)-GsCsCsTsCsAsGsTsCsTsGsCsTsTsCsGsCsAsCsC (SEQ ID NO: 106) indicates that all the chiral linkage phosphorus atoms in the oligonucleotide have Sp configuration.

[0109] Oligonucleotide type: As used herein, the phrase “oligonucleotide type” is used to define an oligonucleotide that has a particular base sequence, pattern of backbone linkages (i.e., pattern of internucleotidic linkage types, for example, phosphate, phosphorothioate, etc), pattern of backbone chiral centers (i.e. pattern of linkage phosphorus stereochemistry (Rp/Sp)), and pattern of backbone phosphorus modifications (e.g., pattern of “-XLR¹” groups in formula I). Oligonucleotides of a common designated “type” are structurally identical to one another.

[0110] One of skill in the art will appreciate that synthetic methods of the present invention provide for a degree of control during the synthesis of an oligonucleotide strand such that each nucleotide unit of the oligonucleotide strand can be designed and/or selected in advance to have a particular stereochemistry at the linkage phosphorus and/or a particular modification at the linkage phosphorus, and/or a particular base, and/or a particular sugar. In some embodiments, an oligonucleotide strand is designed and/or selected in advance to have a particular combination of stereocenters at the linkage phosphorus. In some embodiments, an oligonucleotide strand is designed and/or determined to have a particular combination of modifications at the linkage phosphorus. In some embodiments, an oligonucleotide strand is designed and/or selected to have a particular combination of bases. In some embodiments, an oligonucleotide strand is designed and/or selected to have a particular combination of one or more of the above structural characteristics. The present invention provides compositions comprising or consisting of a plurality of oligonucleotide molecules (e.g., chirally controlled oligonucleotide compositions). In some embodiments, all such molecules are of the same type (i.e., are structurally identical to one another). In many embodiments, however, provided compositions comprise a plurality of oligonucleotides of different types, typically in pre-determined relative amounts.

[0111] Chiral control: As used herein, “chiral control” refers to an ability to control the stereochemical designation of every chiral linkage phosphorus within an oligonucleotide strand. The phrase “chirally controlled oligonucleotide” refers to an oligonucleotide which exists in a single diastereomeric form with respect to the chiral linkage phosphorus.

[0112] Chirally controlled oligonucleotide composition: As used herein, the phrase “chirally controlled oligonucleotide composition” refers to an oligonucleotide composition that contains predetermined levels of individual oligonucleotide types. For instance, in some embodiments a chirally controlled oligonucleotide composition comprises one oligonucleotide type. In some embodiments, a chirally controlled oligonucleotide composition comprises more than one oligonucleotide type. In some embodiments, a chirally controlled oligonucleotide composition comprises a mixture of multiple oligonucleotide types. Exemplary chirally controlled oligonucleotide compositions are described further herein.

[0113] Chirally pure: as used herein, the phrase “chirally pure” is used to describe a chirally controlled oligonucleotide composition in which all of the oligonucleotides exist in a single diastereomeric form with respect to the linkage phosphorus.

[0114] Chirally uniform: as used herein, the phrase “chirally uniform” is used to describe an oligonucleotide molecule or type in which all nucleotide units have the same stereochemistry at the linkage phosphorus. For instance, an oligonucleotide whose nucleotide units all have Rp stereochemistry at the linkage phosphorus is chirally uniform. Likewise, an oligonucleotide whose nucleotide units all have Sp stereochemistry at the linkage phosphorus is chirally uniform.

[0115] Predetermined: By predetermined is meant deliberately selected, for example as opposed to randomly occurring or achieved. Those of ordinary skill in the art, reading the present specification, will appreciate that the present invention provides new and surprising technologies that permit selection of particular oligonucleotide types for preparation and/or inclusion in provided compositions, and further permits controlled preparation of precisely the selected particular types, optionally in selected particular relative amounts, so that provided compositions are prepared. Such provided compositions are “predetermined” as described herein. Compositions that may contain certain individual oligonucleotide types because they happen to have been generated through a process that cannot be controlled to intentionally generate the particular oligonucleotide types is not a “predetermined” composition. In some embodiments, a predetermined composition is one that can be intentionally reproduced (e.g., through repetition of a controlled process).

[0116] Linkage phosphorus: as defined herein, the phrase “linkage phosphorus” is used to indicate that the particular phosphorus atom being referred to is the phosphorus atom present in the internucleotidic linkage, which phosphorus atom corresponds to the phosphorus atom of a phosphodiester of an internucleotidic linkage as occurs in naturally occurring DNA and RNA. In some embodiments, a linkage phosphorus atom is in a modified internucleotidic linkage, wherein each oxygen atom of a phosphodiester linkage is optionally and independently replaced by an organic or inorganic moiety. In some embodiments, a linkage phosphorus atom is P* of formula I. In some embodiments, a linkage phosphorus atom is chiral. In some embodiments, a chiral linkage phosphorus atom is P* of formula I.

[0117] P-modification: as used herein, the term “P-modification” refers to any modification at the linkage phosphorus other than a stereochemical modification. In some embodiments, a P-modification comprises addition, substitution, or removal of a pendant moiety covalently attached to a linkage phosphorus. In some embodiments, the “P-modification” is —X-L-R¹ wherein each of X, L and R¹ is independently as defined and described herein and below.

[0118] Blockmer: the term “blockmer,” as used herein, refers to an oligonucleotide strand whose pattern of structural features characterizing each individual nucleotide unit is characterized by the presence of at least two consecutive nucleotide units sharing a common structural feature at the internucleotidic phosphorus linkage. By common structural feature is meant common stereochemistry at the linkage phosphorus or a common modification at the linkage phosphorus. In some embodiments, the at least two consecutive nucleotide units sharing a common structure feature at the internucleotidic phosphours linkage are referred to as a “block”.

[0119] In some embodiments, a blockmer is a “stereoblockmer,” e.g., at least two consecutive nucleotide units have the same stereochemistry at the linkage phosphorus. Such at lest two consecutive nucleotide units form a “stereoblock.” For instance, (Sp, Sp)-ATsCs1GA is a stereoblockmer because at least two consecutive nucleotide units, the Ts and the Cs1, have the same stereochemistry at the linkage phosphorus (both Sp). In the same oligonucleotide (Sp, Sp)-ATsCs1GA, TsCs1 forms a block, and it is a stereoblock.

[0120] In some embodiments, a blockmer is a “P-modification blockmer,” e.g., at least two consecutive nucleotide units have the same modification at the linkage phosphorus. Such at lest two consecutive nucleotide units form a “P-modification block”. For instance, (Rp, Sp)-ATsCsGA is a P-modification blockmer because at least two consecutive nucleotide units, the Ts and the Cs, have the same P-modification (i.e., both are a phosphorothioate diester). In the same oligonucleotide of (Rp, Sp)-ATsCsGA, TsCs forms a block, and it is a P-modification block.

[0121] In some embodiments, a blockmer is a “linkage blockmer,” e.g., at least two consecutive nucleotide units have identical stereochemistry and identical modifications at the linkage phosphorus. At least two consecutive nucleotide units form a “linkage block”. For instance, (Rp, Rp)-ATsCsGA is a linkage blockmer because at least two consecutive nucleotide units, the Ts and the Cs, have the same stereochemistry (both Rp) and P-modification (both phosphorothioate). In the same oligonucleotide of (Rp, Rp)-ATsCsGA, TsCs forms a block, and it is a linkage block.

[0122] In some embodiments, a blockmer comprises one or more blocks independently selected from a stereoblock, a P-modification block and a linkage block. In some embodiments, a blockmer is a stereoblockmer with respect to one block, and/or a P-modification blockmer with respect to another block, and/or a linkage blockmer with respect to yet another block. For instance, (Rp, Rp, Rp, Rp, Rp, Sp, Sp, Sp)-AAsTsCsGsAs1Ts1Cs1Gs1ATCG (SEQ ID NO: 107) is a stereoblockmer with respect to the stereoblock AsTsCsGsAs1 (all Rp at linkage phosphorus) or Ts1Cs1Gs1 (all Sp at linkage phosphorus), a P-modification blockmer with respect to the P-modification block AsTsCsGs (all s linkage) or As1Ts1Cs1Gs1 (all s1 linkage), or a linkage blockmer with respect to the linkage block AsTsCsGs (all Rp at linkage phosphorus and all s linkage) or Ts1Cs1Gs1 (all Sp at linkage phosphorus and all si linkage).

[0123] Altmer: the term “altmer,” as used herein, refers to an oligonucleotide strand whose pattern of structural features characterizing each individual nucleotide unit is characterized in that no two consecutive nucleotide units of the oligonucleotide strand share a particular structural feature at the internucleotidic phosphorus linkage. In some embodiments, an altmer is designed such that it comprises a repeating pattern. In some embodiments, an altmer is designed such that it does not comprise a repeating pattern.

[0124] In some embodiments, an altmer is a “stereoaltmer,” e.g., no two consecutive nucleotide units have the same stereochemistry at the linkage phosphorus. For instance, (Rp, Sp, Rp, Sp, Rp, Sp, Rp, Sp, Rp, Sp Rp, Sp, Rp, Sp, Rp, Sp, Rp, Sp, Rp)-GsCsCsTsCsAsGsTsCsTsGsCsTsTsCsGsCsAsCsC (SEQ ID NO: 106).

[0125] In some embodiments, an altmer is a “P-modification altmer” e.g., no two consecutive nucleotide units have the same modification at the linkage phosphorus. For instance, All-(Sp)-CAs1GsT, in which each linkage phosphorus has a different P-modification than the others.

[0126] In some embodiments, an altmer is a “linkage altmer,” e.g., no two consecutive nucleotide units have identical stereochemistry or identical modifications at the linkage phosphorus. For instance, (Rp, Sp, Rp, Sp, Rp, Sp, Rp, Sp, Rp, Sp Rp, Sp, Rp, Sp, Rp, Sp, Rp, Sp, Rp)-GsCs1CsTs1CsAs1GsTs1CsTs1GsCs1TsTs2CsGs3CsAs4CsC (SEQ ID NO: 106).

[0127] Unimer: the term “unimer,” as used herein, refers to an oligonucleotide strand whose pattern of structural features characterizing each individual nucleotide unit is such that all nucleotide units within the strand share at least one common structural feature at the internucleotidic phosphorus linkage. By common structural feature is meant common stereochemistry at the linkage phosphorus or a common modification at the linkage phosphorus.

[0128] In some embodiments, a unimer is a “stereounimer,” e.g., all nucleotide units have the same stereochemistry at the linkage phosphorus. For instance, All-(Sp)-CsAs1GsT, in which all the linkages have Sp phosphorus.

[0129] In some embodiments, a unimer is a “P-modification unimer”, e.g., all nucleotide units have the same modification at the linkage phosphorus. For instance, (Rp, Sp, Rp, Sp, Rp, Sp, Rp, Sp, Rp, Sp Rp, Sp, Rp, Sp, Rp, Sp, Rp, Sp, Rp)-GsCsCsTsCsAsGsTsCsTsGsCsTsTsCsGsCsAsCsC (SEQ ID NO: 106), in which all the internucleotidic linkages are phosphorothioate diester.

[0130] In some embodiments, a unimer is a “linkage unimer,” e.g., all nucleotide units have the same stereochemistry and the same modifications at the linkage phosphorus. For instance, All-(Sp)-GsCsCsTsCsAsGsTsCsTsGsCsTsTsCsGsCsAsCsC (SEQ ID NO: 106), in which all the internucleotidic linkages are phosphorothioate diester having Sp linkage phosphorus.

[0131] Gapmer: as used herein, the term “gapmer” refers to an oligonucleotide strand characterized in that at least one internucleotidic phosphorus linkage of the oligonucleotide strand is a phosphate diester linkage, for example such as those found in naturally occurring DNA or RNA. In some embodiments, more than one internucleotidic phosphorus linkage of the oligonucleotide strand is a phosphate diester linkage such as those found in naturally occurring DNA or RNA. For instance, All-(Sp)-CAs1GsT, in which the internucleotidic linkage between C and A is a phosphate diester linkage.

[0132] Skipmer: as used herein, the term “skipmer” refers to a type of gapmer in which every other internucleotidic phosphorus linkage of the oligonucleotide strand is a phosphate diester linkage, for example such as those found in naturally occurring DNA or RNA, and every other internucleotidic phosphorus linkage of the oligonucleotide strand is a modified internucleotidic linkage. For instance, All-(Sp)-AsTCs1GAs2TCs3G.

[0133] For purposes of this invention, the chemical elements are identified in accordance with the Periodic Table of the Elements, CAS version, Handbook of Chemistry and Physics, 67th Ed., 1986-87, inside cover.

[0134] The methods and structures described herein relating to compounds and compositions of the invention also apply to the pharmaceutically acceptable acid or base addition salts and all stereoisomeric forms of these compounds and compositions.

### BRIEF DESCRIPTION OF THE DRAWING

[0135] FIG. 1. Chirally controlled oligonucleotide has significantly different retention time on HPLC compared to the stereorandom oligonucleotide. A: crude chirally controlled oligonucleotide (Oligonucleotide 101); C: the corresponding stereorandom oligonucleotide (Oligonucleotide 118).

[0136] FIG. 2. HPLC of chirally controlled oligonucleotides and stereorandom oligonucleotide. A: Oligonucleotide 101 (all-Rp); B: Oligonucleotide 102 (all-Sp); and C: Oligonucleotide 118 (stereorandom).

[0137] FIG. 3. Tm of chirally controlled oligonucleotides and stereorandom oligonucleotide.

[0138] FIG. 4. Representative Data: Melting Curve Analysis of the target and endogenous control pairs yield single amplicons.

[0139] FIG. 5. Representative data and IC₅₀ curves for compounds.

[0140] FIG. 6. HPLC of crude (Rp, Rp, Sp, Rp, Rp, Sp, Rp, Rp, Sp, Rp, Rp, Sp, Rp, Rp, Sp, Rp, Rp, Sp, Rp)-d[GsCsCsTsCsAsGsTsCsTsGsCsTsTsCsGsCsAsCsC] ((RRS)₆—R (SEQ ID NO: 106), stereoblockmer and P-modification unimer (s-unimer)).

[0141] FIG. 7. HPLC of purified (Rp, Rp, Sp, Rp, Rp, Sp, Rp, Rp, Sp, Rp, Rp, Sp, Rp, Rp, Sp, Rp, Rp, Sp, Rp)-d[GsCsCsTsCsAsGsTsCsTsGsCsTsTsCsGsCsAsCsC] ((RRS)₆—R (SEQ ID NO: 106), stereoblockmer and P-modification unimer (s-unimer)).

[0142] FIG. 8. LCMS of (Rp, Rp, Sp, Rp, Rp, Sp, Rp, Rp, Sp, Rp, Rp, Sp, Rp, Rp, Sp, Rp, Rp, Sp, Rp)-d[GsCsCsTsCsAsGsTsCsTsGsCsTsTsCsGsCsAsCsC] ((RRS)₆—R (SEQ ID NO: 106), stereoblockmer and P-modification unimer (s-unimer)).

[0143] FIG. 9. HPLC of crude (Sp, Rp, Rp, Sp, Rp, Rp, Sp, Rp, Rp, Sp, Rp, Rp, Sp, Rp, Rp, Sp, Rp, Rp, Sp)-d[GsCsCsTsCsAsGsTsCsTsGsCsTsTsCsGsCsAsCsC] (S—(RRS)₆ (SEQ ID NO: 106), stereoblockmer and P-modification unimer (s-unimer)).

[0144] FIG. 10. HPLC of purified (Sp, Rp, Rp, Sp, Rp, Rp, Sp, Rp, Rp, Sp, Rp, Rp, Sp, Rp, Rp, Sp, Rp, Rp, Sp)-d[GsCsCsTsCsAsGsTsCsTsGsCsTsTsCsGsCsAsCsC] (S—(RRS)₆ (SEQ ID NO: 106), stereoblockmer and P-modification unimer (s-unimer)).

[0145] FIG. 11. LCMS of (Sp, Rp, Rp, Sp, Rp, Rp, Sp, Rp, Rp, Sp, Rp, Rp, Sp, Rp, Rp, Sp, Rp, Rp, Sp)-d[GsCsCsTsCsAsGsTsCsTsGsCsTsTsCsGsCsAsCsC] (S—(RRS)₆ (SEQ ID NO: 106), stereoblockmer and P-modification unimer (s-unimer)).

[0146] FIG. 12. HPLC of crude (Rp, Sp, Rp, Rp, Sp, Rp, Rp, Sp, Rp, Rp, Sp, Rp, Rp, Sp, Rp, Rp, Sp, Rp, Rp) d[GsCsCsTsCsAsGsTsCsTsGsCsTsTsCsGsCsAsCsC] (RS-(RRS)s-RR (SEQ ID NO: 106), stereoblockmer and P-modification unimer (s-unimer)).

[0147] FIG. 13. HPLC of purified (Rp, Sp, Rp, Rp, Sp, Rp, Rp, Sp, Rp, Rp, Sp, Rp, Rp, Sp, Rp, Rp, Sp, Rp, Rp) d[GsCsCsTsCsAsGsTsCsTsGsCsTsTsCsGsCsAsCsC] (RS-(RRS)s-RR (SEQ ID NO: 106), stereoblockmer and P-modification unimer (s-unimer)).

[0148] FIG. 14. LCMS of (Rp, Sp, Rp, Rp, Sp, Rp, Rp, Sp, Rp, Rp, Sp, Rp, Rp, Sp, Rp, Rp, Sp, Rp, Rp)-d[GsCsCsTsCsAsGsTsCsTsGsCsTsTsCsGsCsAsCsC] (RS-(RRS)s-RR (SEQ ID NO: 106), stereoblockmer and P-modification unimer (s-unimer)).

[0149] FIG. 15. HPLC of crude (Rp, Rp, Rp, Sp, Sp, Sp, Sp, Sp, Rp, Rp, Rp)-d[5mCs1As1Gs1Ts15mCs1Ts1Gs15mCs1Ts1Ts15mCs1G] (SEQ ID NO: 108) (3R-5S-3R, stereoblockmer and P-modification unimer (s1-unimer)).

[0150] FIG. 16. HPLC of purified (Rp, Rp, Rp, Sp, Sp, Sp, Sp, Sp, Rp, Rp, Rp)-d[5mCs1As1Gs1Ts15mCs1Ts1Gs15mCs1Ts1Ts15mCs1G] (SEQ ID NO: 108) (3R-5S-3R, stereoblockmer and P-modification unimer (s1-unimer)).

[0151] FIG. 17. LCMS of (Rp, Rp, Rp, Sp, Sp, Sp, Sp, Sp, Rp, Rp, Rp)-d[5mCs1As1Gs1Ts15mCs1Ts1Gs15mCs1Ts1Ts15mCs1G] (SEQ ID NO: 108) (3R-5S-3R, stereoblockmer and P-modification unimer (s1-unimer)).

[0152] FIG. 18. HPLC of crude All-(Rp)-d[Cs3As3Gs3T] (P-modification unimer (s3-unimer), stereounimer and linkage unimer).

[0153] FIG. 19. LCMS of All-(Rp)-d[Cs3As3Gs3T] (P-modification unimer (s3-unimer), stereounimer and linkage unimer).

[0154] FIG. 20. HPLC of crude All-(Rp)-d[Cs2As2Gs2T] (P-modification unimer (s2-unimer), stereounimer and linkage unimer).

[0155] FIG. 21. LCMS of All-(Rp)-d[Cs2As2Gs2T] (P-modification unimer (s2-unimer), stereounimer and linkage unimer).

[0156] FIG. 22. HPLC of crude All-(Sp)-d[Cs1AGs1T] (gapmer, stereoaltmer, P-modification altmer and linkage altmer).

[0157] FIG. 23. LCMS of All-(Sp)-d[Cs1AGs1T] (gapmer stereoaltmer, P-modification altmer and linkage altmer).

[0158] FIG. 24. Crude All-(Rp)-d[TsCs1AsT] (stereounimer, P-modification altmer and linkage altmer).

[0159] FIG. 25. LCMS of All-(Rp)-d[TsCs1AsT] (stereounimer, P-modification altmer and linkage altmer).

[0160] FIG. 26. Exemplary oligonucleotides (SEQ ID NOS 133 and 133, respectively, in order of appearance) described in WO2012/030683 and contemplated for synthesis using methods of the present invention.

[0161] FIG. 27. Exemplary oligonucleotides (SEQ ID NOS 134-135, 135, 134, 136 and 135, respectively, in order of appearance) described in WO2012/030683 and contemplated for synthesis using methods of the present invention.

[0162] FIG. 28. Exemplary oligonucleotides (SEQ ID NOS 135, 135, 135, 135, 135 and 137, respectively, in order of appearance) described in WO2012/030683 and contemplated for synthesis using methods of the present invention.

[0163] FIG. 29. Exemplary oligonucleotides (SEQ ID NOS 136, 138, 136 and 137, respectively, in order of appearance) described in WO2012/030683 and contemplated for synthesis using methods of the present invention.

[0164] FIG. 30. Exemplary oligonucleotides (SEQ ID NOS 134, 133 and 133, respectively, in order of appearance) described in WO2012/030683 and contemplated for synthesis using methods of the present invention.

[0165] FIG. 31. Exemplary linkers described in WO2012/030683 for use in methods of the present invention.

[0166] FIG. 32. Exemplary linkers described in WO2012/030683 for use in methods of the present invention.

[0167] FIG. 33. Exemplary linkers described in WO2012/030683 for use in methods of the present invention.

[0168] FIG. 34. Exemplary linkers described in WO2012/030683 for use in methods of the present invention.

[0169] FIG. 35. RP-HPLC of crude DMT on oligonucleotide: ONT-75 (Panel A); ONT-80 (Panel B); ONT-77 (Panel C); ONT-81 (Panel D); ONT-87 (Panel E); ONT-88 (Panel F); ONT-89 (Panel G); ONT-82 (Panel H); ONT-84 (Panel I); ONT-85 (Panel J); ONT-86 (Panel K).

[0170] FIG. 36. RP-HPLC of purified DMT off oligonucleotide: ONT-75 (Panel A); ONT-80 (Panel B); ONT-77 (Panel C); ONT-81 (Panel D); ONT-87 (Panel E); ONT-88 (Panel F); ONT-89 (Panel G); ONT-82 (Panel H); ONT-84 (Panel I); ONT-85 (Panel J); ONT-86 (Panel K).

[0171] FIG. 37. Overlay of RP-HPLC traces of purified DMT off oligonucleotide: ONT-75, ONT-77, ONT-80, ONT-81, ONT-87, ONT-88, ONT-89, and ONT-41 (Panel A); expanded view of overlay of ONT-75, ONT-77, ONT-80, ONT-81, ONT-87, ONT-88, ONT-89, and ONT-41 (Panel B).

[0172] FIG. 38. Overlay of RP-HPLC traces of purified DMT off oligonucleotide: ONT-82, ONT-84, ONT-85, ONT-86, and ONT-83 (Panel A); expanded view of overlay of ONT-82, ONT-84, ONT-85, ONT-86, and ONT-83 (Panel B).

[0173] FIG. 39. Tm overlay of chirally controlled oligonucleotides ONT-81, ONT-41, ONT-75, ONT-77, and ONT-80.

[0174] FIG. 40. Graphical representation of timecourse of serum human apolipoprotein B protein levels relative to PBS after 5 mg/kg stereoisomer or mipomersen IP dosing in huApoB mice for ONT-41, ONT-75, ONT-80, ONT-77, and ONT-81. A downward arrow indicates dosing days.

[0175] FIG. 41. Graphical representation of timecourse of serum human apolipoprotein B protein levels relative to PBS after 5 mg/kg stereoisomer or mipomersen IP dosing in huApoB mice for mipomersen, “full R” mipomersen, “full S” mipomersen, “RSR” mipomersen, and “SRS” mipomersen. A downward arrow indicates dosing days.

[0176] FIG. 42. Graphical representation of timecourse of serum human apolipoprotein B protein levels relative to PBS after 10 mg/kg stereoisomer or mipomersen IP dosing in huApoB mice for mipomersen, “full R” mipomersen, “full S” mipomersen, “RSR” mipomersen, and “SRS” mipomersen. A downward arrow indicates dosing days.

[0177] FIG. 43. Graphical representation of timecourse of serum human apolipoprotein B protein levels relative to PBS after 5 mg/kg stereoisomer or mipomersen IP dosing in huApoB mice for mipomersen, ONT-87, ONT-88, and ONT-89. A downward arrow indicates dosing days.

[0178] FIG. 44. Graphical representation of timecourse of serum human apolipoprotein B protein levels relative to PBS after 10 mg/kg stereoisomer or mipomersen IP dosing in huApoB mice for ONT-87, ONT-88, and ONT-89. A downward arrow indicates dosing days.

[0179] FIG. 45. Graphical representation of % PCSK-9 mRNA remaining after Hep3B treatment with siRNA duplex.

[0180] FIG. 46. Graphical representation of % PCSK-9 mRNA remaining after Hep3B treatment with siRNA duplex curve fit.

[0181] FIG. 47. Graphical representation of % PCSK-9 mRNA remaining after HeLa treatment with siRNA duplex.

[0182] FIG. 48. Graphical representation of % PCSK-9 mRNA remaining after HeLa treatment with siRNA duplex curve fit.

[0183] FIG. 49. Graphical representation of % PCSK-9 mRNA remaining after HeLa treatment with siRNA duplex containing 3 Phophorothiate stereo-centers.

[0184] FIG. 50. Graphical representation of % PCSK-9 mRNA remaining after HeLa treatment with siRNA duplex containing 3 Phophorothiate stereo-centers curve fit.

[0185] FIG. 51. Overlay of RP-HPLC traces of purified DMT off oligonucleotide: ONT-108, ONT-109, and ONT-114.

[0186] FIG. 52. Overlay of RP-HPLC traces of purified DMT off oligonucleotide: ONT-106, ONT-107, and ONT-114.

[0187] FIG. 53. Graphical representation of timecourse of serum human apolipoprotein B protein levels relative to PBS after 10 mg/kg stereoisomer or mipomersen IP dosing in huApoB mice. A downward arrow indicates dosing days.

[0188] FIG. 54. Graphical representation of timecourse of serum human apolipoprotein B protein levels relative to PBS after multiple IP doses of 5 mg/kg stereoisomer or mipomersen in huApoB mice (n=3-4). A downward arrow indicates dosing days.

[0189] FIG. 55. Day 17 serum human apolipoprotein B protein levels relative to PBS after 10 mg/kg stereoisomer (ONT-87, ONT-88 or ONT-89) or mipomersen IP dosing in huApoB mice.

[0190] FIG. 56. Day 24 Serum Human Apolipoprotein B Protein Levels Relative to PBS After 10 mg/kg Stereoisomer (ONT-87, ONT-88 or ONT-89) or Mipomersen IP Dosing in huApoB Mice.

[0191] FIG. 57. Serum Human Apolipoprotein B Protein Levels Relative to PBS After 10 mg/kg Stereoisomer (ONT-41, ONT-87, ONT-88 or ONT-89) Dosing in huApoB Mice.

[0192] FIG. 58. Serum Human Apolipoprotein B Protein Levels Relative to PBS After 10 mg/kg Stereoisomer (ONT-87, ONT-88 or ONT-89) Dosing in huApoB Mice.

[0193] FIG. 59. Plot of IEX-HPLC quantification analysis of svPDE digestion study for oligonucleotides ONT-75, ONT-77, ONT-80, ONT-81, ONT-87, ONT-88, ONT-89 and ONT-41.

[0194] FIG. 60. IEX-HPLC of enzymatic digestion study using nP1 for oligonucleotide ONT-75 (All (Rp))-Gs5mCs5mCsTs5mCsAsGsTs5mCsTsGs5mCsTsTs5mCsGs 5mCsAs5mCs5mC (SEQ ID NO: 106).

[0195] FIG. 61. IEX-HPLC of enzymatic digestion study using nP1 for oligonucleotide ONT-77 (Rp, Rp, Rp, Rp, Rp, Sp, Sp, Sp, Sp, Sp, Sp, Sp, Sp, Sp, Sp, Rp, Rp, Rp, Rp)-Gs5mCs5mCsTs5mCsAsGsTs5mCsTsGs5mCsTsTs5mCsGs5mCsAs5mCs5mC (SEQ ID NO: 106) (5R-10S-4R).

[0196] FIG. 62. IEX-HPLC of enzymatic digestion study using nP1 for oligonucleotide ONT-80 (All (Sp))-Gs5mCs5mCsTs5mCsAsGsTs5mCsTsGs5mCsTsTs5mCs Gs5mCsAs5mCs5mC (SEQ ID NO: 106).

[0197] FIG. 63. IEX-HPLC of enzymatic digestion study using nP1 for oligonucleotide ONT-81 (Sp, Sp, Sp, Sp, Sp, Rp, Rp, Rp, Rp, Rp, Rp, Rp, Rp, Rp, Rp, Sp, Sp, Sp, Sp)-Gs5mCs5mCsTs5mCsAsGsTs5mCsTsGs5mCsTsTs5mCsGs5mCsAs5mCs5mC (SEQ ID NO: 106) (5S-10R-4S).

[0198] FIG. 64. IEX-HPLC of enzymatic digestion study using nP1 for oligonucleotide ONT-87 (Rp, Rp, Rp, Rp, Rp, Sp, Sp, Rp, Sp, Sp, Rp, Sp, Sp, Rp, Rp, Rp, Rp, Rp, Rp)-Gs5mCs5mCsTs5mCsAsGsTs5mCsTsGs5mCsTsTs5mCsGs5mCsAs5mCs5mC (SEQ ID NO: 106) (5R-(SSR)₃-5R).

[0199] FIG. 65. IEX-HPLC of enzymatic digestion study using nP1 for oligonucleotide ONT-88 (Sp, Sp, Sp, Sp, Sp, Rp, Rp, Sp, Rp, Rp, Sp, Rp, Rp, Sp, Sp, Sp, Sp, Sp, Sp)-Gs5mCs5mCsTs5mCsAsGsTs5mCsTsGs5mCsTsTs5mCsGs5mCsAs5mCs5mC (SEQ ID NO: 106) (5S-(RRS)₃-5S).

[0200] FIG. 66. IEX-HPLC of enzymatic digestion study using nP1 for oligonucleotide ONT-89 (Sp, Rp, Sp, Rp, Sp, Rp, Sp, Rp, Sp, Rp, Sp, Rp, Sp, Rp, Sp, Rp, Sp, Rp, Sp)-Gs5mCs5mCsTs5mCsAsGsTs5mCsTsGs5mCsTsTs5mCsGs5mCsAs5mCs5mC (SEQ ID NO: 106) ((SR)₉S).

[0201] FIG. 67. IEX-HPLC of enzymatic digestion study using nP1 for oligonucleotide ONT-41 (diastereomixture)-Gs5mCs5mCsTs5mCsAsGsTs5mCsTsGs 5mCsTsTs5mCsGs5mCsAs5mCs5mC (SEQ ID NO: 106).

[0202] FIG. 68. Comparison of stability of chirally pure oligonucleotides ONT-75 and ONT-77 with the stereorandom “parental” oligonucleotide ONT-41 (Mipomersen) in preincubated rat whole liver homogenate.

[0203] FIG. 69. UPLC profile in producing oligonucleotide derivative using the monomer of 13b.

[0204] FIG. 70. UPLC profile in producing oligonucleotide derivative using the monomer of 27.

[0205] FIG. 71. Mouse Apolipoprotein B/GAPDH mRNA Levels Relative to Mock and Untreated Controls after Transfection of Primary Mouse Hepatocytes with Stereoisomer (ONT-82, ONT-83, ONT-84, ONT-85 or ONT-86).

[0206] FIG. 72. Mouse Apolipoprotein B/GAPDH mRNA Levels Relative to Mock and Untreated Controls after Transfection of Primary Mouse Hepatocytes with Stereoisomer (ONT-83, ONT-84, ONT-85 or ONT-86).

### DETAILED DESCRIPTION OF CERTAIN EMBODIMENTS

[0207] Synthetic oligonucleotides provide useful molecular tools in a wide variety of applications. For example, oligonucleotides are useful in therapeutic, diagnostic, research, and new nanomaterials applications. The use of naturally occurring nucleic acids (e.g., unmodified DNA or RNA) is limited, for example, by their susceptibility to endo- and exo-nucleases. As such, various synthetic counterparts have been developed to circumvent these shortcomings. These include synthetic oligonucleotides that contain backbone modifications, which render these molecules less susceptible to degradation. From a structural point of view, such modifications to internucleotide phosphate linkages introduce chirality. It has become clear that certain properties of oligonucleotides may be affected by the configurations of the phosphorus atoms that form the backbone of the oligonucleotides. For example, in vitro studies have shown that the properties of antisense nucleotides such as binding affinity, sequence specific binding to the complementary RNA, stability to nucleases are affected by, inter alia, chirality of the backbone (e.g., the configurations of the phosphorus atoms). Thus, the present invention encompasses the recognition that there is a need for chirally controlled oligonucleotides which comprise phosphorus atom-modified nucleic acids, as well as related compositions and methods. In some embodiments, the present invention provides chirally controlled oligonucleotides that are structurally optimized to exhibit certain desirable characteristics, such as, e.g., increased stability and improved efficacy for in vitro and/or in vivo applications.

[0208] Oligonucleotides in which one or two of the two nonbridging oxygen atoms of the internucleotidic phosphates is replaced by a different type of atom or substituent are known to be useful as therapeutic agents and probes to elucidate enzymatic reaction mechanisms. However, such oligonucleotides often exhibit undesirable properties (e.g., susceptibility to degradation by nucleases, poor cell membrane permeability) that prohibit their use in numerous applications. Thus, various types of chemical modifications have been developed in an attempt to improve their properties and/or impart new functionality.

### Modified Oligonucleotide Structures

[0209] As noted above, in light of the usefulness of oligonucleotide compositions in various applications and indications, those skilled in the art have endeavoured to develop modifications of oligonucleotide structures that may have preferred or desirable characteristics or attributes as compared with naturally-occurring oligonucleotide molecules, for example as used in particular applications and indications. Exemplary such modifications are described below.

[0210] WO2010/141471 (herein “Traversa I”) teaches the modification of different types of nucleic acid constructs modified to have a reduced net polyanionic charge. WO2010/039543 (herein “Travera II”) teaches compositions and methods for making neutral polynucleotides (NNs) with reduced polyanionic charge. WO2008/008476 (herein, “Traversa III”) describes the synthesis of SATE (Imbach-type) phosphate prodrugs. Traversa I, II, and III do not teach chirally controlled oligonucleotides, compositions thereof, and methods of making and using the same, as described by the present invention.

[0211] WO2010/072831 (herein “Girindus et al.”) also teaches the modification of oligonucleotides. In particular, Girindus et al. teaches the use of sulfurization reagents to generate phosphorothioate triesters as prodrugs. Girindus et al. does not teach chirally controlled oligonucleotides, compositions thereof, and methods of making and using the same, as described by the present invention.

[0212] Similarly, WO2004/085454 (herein “Avecia I”) teaches the preparation of phosphorothioate oligonucleotides through, e.g., transient silylation of poly-H-phosphonate diesters. WO2001/027126 (herein “Avecia I”) teaches processes for the solid phase synthesis of phosphotriester oligonucleotides by coupling H-phosphonate monomers to a solid supported 5′-hydroxyl oligonucleotide and further sulfurization of the resulting H-phosphonte diester into a phosphorothioate triester. The disclosure of WO2001/064702 (herein “Avecia III”) is similar to Avecia II and further describes solid-phase synthesis on different solid supports. Avecia I, II, and III do not teach chirally controlled oligonucleotides, compositions thereof, and methods of making and using the same, as described by the present invention.

[0213] WO1997/006183 (herein “Chiron”) teaches oligonucleotides with cationic internucleotide linkages comprising asymmetric phosphorus, such as stereopure amidates. Chiron teaches stereopure oligonucleotides obtained via crystallization of a mixture of diastereomers or via resolution using, e.g., column chromatography. Chiron does not teach chirally controlled oligonucleotides, compositions thereof, and methods of making and using the same, as described by the present invention.

[0214] WO2009/146123 (herein “Spring Bank I”) teaches compositions and methods for treating viral infections using substituted phosphate oligonucleotides and phosphorothioate triesters. WO2007/070598 (herein “Spring Bank II”) teaches phosphotriester prodrugs as antiviral nucleic acids and teaches the synthesis of phosphorothioate prodrugs. Spring Bank I and II do not teach chirally controlled oligonucleotides, compositions thereof, and methods of making and using the same, as described by the present invention.

[0215] EP0779893 (herein “Hybridon”) teaches lipophilic prodrugs for the increased cellular uptake of antisense oligonucleotides and observes that Rp and Sp phosphorothioates and phosphorothioate triester dimers can have different enzymatic stability properties. Hybridon does not teach chirally controlled oligonucleotides, compositions thereof, and methods of making and using the same, as described by the present invention.

[0216] WO1997/047637 (herein “Imbach I”) teaches generally the Imbach “SATE” (S-acyl thioethyl) prodrug oligonucleotide compositions and methods. Imbach I describes, for example, bioreversible phosphotriester prodrugs and the preparation of certain prodrug oligonucleotides using post-synthetic alkylation or prodrug-group-containing phosphoramidites. U.S. Pat. No. 6,124,445 (herein “Imbach II”) teaches modified antisense and chimeric prodrug oligonucleotides. Imbach I and II do not teach chirally controlled oligonucleotides, compositions thereof, and methods of making and using the same, as described by the present invention.

[0217] WO2006/065751 (herein “Beaucage”) teaches CpG oligonucleotide phosphorothioate prodrugs that comprise thermolabile substituents (which substituents are introduced via a phosphoramidite monomer), and applications thereof. Beaucage does not teach chirally controlled oligonucleotides, compositions thereof, and methods of making and using the same, as described by the present invention.

[0218] Takeshi Wada et al. developed novel methods for the stereo-controlled synthesis of P-chiral nucleic acids using amidite chiral auxiliaries (JP4348077, WO2005/014609, WO2005/092909, and WO2010/064146, cumulatively referred to herein as “Wada I”). In particular, WO2010/064146 (referred to herein as “Wada II”) discloses methods for synthesizing phosphorus atom-modified nucleic acids wherein the stereochemical configuration at phosphorus is controlled. However, the methods of Wada II are limited in that they do not provide for individual P-modification of each chiral linkage phosphorus in a controlled and designed manner. That is, the methods for P-modified linkages of Wada II provide for the generation of a condensed intermediate poly H-phosphonate oligonucleotide strand that, once built to a desired length, is mass modified at the linkage phosphorus to provide, e.g., a desired phosphorothioate diester, phosphoramidate or boranophosphate or other such phosphorus atom-modified nucleic acids (referred to as Route B in the document—Scheme 6, page 36). Furthermore, the H-phosphonate oligonucleotide strands of Wada II are of shorter lengths (e.g., dimer trimer, or tetramer). Combined with the fact that there is no capping step in route B, which generally presents low crude purity as a result of the accumulation of “n−1”-type byproducts, the Wada II route contains limitations in regards of the synthesis of longer oligonucleotides. While Wada II contemplates generally that a particular oligonucleotide could be envisaged to contain different modifications at each linkage phosphorus, Wada II does not describe or suggest methods for controlled iterative installation of such modifications, as are described herein. To the extent that Wada II depicts a synthetic cycle that does not require an H-phosphonate intermediate oligonucleotide to be completely assembled prior to modification at the linkage phosphorus (therein referred to as Route A, page 35, Scheme 5, “Synthesis of a nucleic acid comprising a chiral X-phosphonate moiety of Formula 1 via Route A”), this general disclosure does not teach certain key steps that are required to install certain P-modifications, as provided by the present invention, and especially not with any degree of efficiency and versatility such that this cycle would be useful in the synthesis of chirally controlled P-modified oligonucleotides, and especially oligonucleotides of longer lengths.

[0219] At least one such inefficiency of Wada II is noted by Wada et al. in WO2012/039448 (herein “Wada III”). Wada III teaches novel chiral auxiliaries for use in Wada II methods to produce H-phosphonate oligonucleotides that, once built, can be subsequently modified to provide, inter alia, phosphorothioates and the like. Wada et al. observe in Wada III that the four types of chiral auxiliaries disclosed in Wada II formed strong bonds with phosphorus at the linkage phosphorus and thus did not allow for efficient removal. Wada III notes that removal of the Wada II chiral auxiliaries required harsh conditions, which conditions were prone to compromising the integrity of the product oligonucleotide. Wada III observes that this is especially problematic when synthesizing long chain oligonucleotides for at least the reason that as the degradation reaction(s) proceed, additional byproducts are generated that can further react with and degrade the product oligonucleotide. Wada III therefore provides chiral auxiliaries that can be more efficiently cleaved from the oligonucleotide under mild acidic conditions by way of an S_{N}1 mechanism releasing the H-phosphonate internucleotide linkage (route B), or under relatively mild basic conditions, by a β-elimation pathway.

[0220] One of skill in the chemical and synthetic arts will immediately appreciate the complexities associated with generating chirally controlled oligonucleotides such as those provided by the present invention. For instance, in order to synthesize and isolate a chirally controlled oligonucleotide, conditions for each monomer addition must be designed such that (1) the chemistry is compatible with every portion of the growing oligonucleotide; (2) the byproducts generated during each monomer addition do not compromise the structural and stereochemical integrity of the growing oligonucleotide; and (3) the crude final product composition is a composition which allows for isolation of the desired chirally controlled oligonucleotide product.

[0221] Oligonucleotide phosphorothioates have shown therapeutic potential (Stein et al., Science (1993), 261:1004-12; Agrawal et al., Antisence Res. and Dev. (1992), 2:261-66; Bayever et al., Antisense Res. and Dev. (1993), 3:383-390). Oligonucleotide phosphorothioates prepared without regard to the stereochemistry of the phosphorothioate exist as a mixture of 2ⁿ diastereomers, where n is the number of internucleotide phosphorothioates linkages. The chemical and biological properties of these diastereomeric phosphorothioates can be distinct. For example, Wada et al (Nucleic Acids Symposium Series No. 51 p. 119-120; doi:10.1093/nass/nrm060) found that stereodefined-(Rp)-(Ups)9U/(Ap)9A duplex showed a higher Tm value than that of natural-(Up)9U/(Ap)9A and stereodefined-(Sp)-(Ups)₉U did not form a duplex. In another example, in a study by Tang et al., (Nucleosides Nucleotides (1995), 14:985-990) stereopure Rp-oligodeoxyribonucleoside phosphorothioates were found to possess lower stability to nucleases endogenous to human serum that the parent oligodeoxyribonucleoside phosphorothioates with undefined phosphorus chirality.

### Chirally Controlled Oligonucleotides and Chirally Controlled Oligonucleotide Compositions

[0222] The present invention provides chirally controlled oligonucleotides, and chirally controlled oligonucleotide compositions which are of high crude purity and of high diastereomeric purity. In some embodiments, the present invention provides chirally controlled oligonucleotides, and chirally controlled oligonucleotide compositions which are of high crude purity. In some embodiments, the present invention provides chirally controlled oligonucleotides, and chirally controlled oligonucleotide compositions which are of high diastereomeric purity.

[0223] In some embodiments, the present invention provides chirally controlled compositions comprising a plurality of oligonucleotides of at least one type, wherein each type is defined by: 1) base sequence; 2) pattern of backbone linkages; 3) pattern of backbone chiral centers; and 4) pattern of backbone P-modifications.

[0224] In some embodiments, the present invention provides chirally controlled compositions comprising a plurality of oligonucleotides of the same type, wherein each type is defined by: 1) base sequence; 2) pattern of backbone linkages; 3) pattern of backbone chiral centers; and 4) pattern of backbone P-modifications. In some embodiments, the present invention provides chirally controlled compositions comprising a plurality of oligonucleotides of two or more types, wherein each type is defined by: 1) base sequence; 2) pattern of backbone linkages; 3) pattern of backbone chiral centers; and 4) pattern of backbone P-modifications.

[0225] In some embodiments, the present invention provides oligonucleotides comprising one or more diastereomerically pure internucleotidic linkages with respect to the chiral linkage phosphorus. In some embodiments, the present invention provides oligonucleotides comprising one or more diastereomerically pure internucleotidic linkages having the structure of formula I. In some embodiments, the present invention provides oligonucleotides comprising one or more diastereomerically pure internucleotidic linkages with respect to the chiral linkage phosphorus, and one or more phosphate diester linkages. In some embodiments, the present invention provides oligonucleotides comprising one or more diastereomerically pure internucleotidic linkages having the structure of formula I, and one or more phosphate diester linkages. In some embodiments, the present invention provides oligonucleotides comprising one or more diastereomerically pure internucleotidic linkages having the structure of formula I-c, and one or more phosphate diester linkages. In some embodiments, such oligonucleotides are prepared by using stereoselective oligonucleotide synthesis, as described in this application, to form pre-designed diastereomerically pure internucleotidic linkages with respect to the chiral linkage phosphorus. For instance, in one exemplary oligonucleotide of (Rp/Sp, Rp/Sp, Rp/Sp, Rp, Rp, Sp, Sp, Sp, Sp, Sp Sp, Sp, Sp, Sp, Rp, Rp, Rp, Rp, Rp)-d[GsCsCsTsCsAsGsTsCsTsGsCsTsTsCsGs1Cs1As1CsC] (SEQ ID NO: 106), the first three internucleotidic linkages are constructed using traditional oligonucleotide synthesis method, and the diastereomerically pure internucleotidic linkages are constructed with stereochemical control as described in this application. Exemplary internucleotidic linkages, including those having structures of formula I, are further described below. In some embodiments, such oligonucleotides comprise a sequence further described in the application, including but not limited to those described in Tables 2 and 4, and Appendices A, B and C.

[0226] In some embodiments, a provided oligonucleotide comprises a combination of stereopure and stereorandom internucleotidic linkages with respect to chirality at the linkage phosphorus. For instance, in some embodiments it is desirable to have a block of one or more stereodefined internucleotidic linkages within an oligonucleotide that is otherwise stereorandom with respect to chirality at the linkage phosphorus. In some embodiments, it is desirable to have a block of one or more internucleotidic linkages that are stereorandom within an oligonucleotide that is otherwise stereodefined with respect to chirality at the linkage phosphorus.

[0227] In some embodiments, at least one nucleotide unit of a provided oligonucleotide is installed using stereoselective oligonucleotide synthesis, as described in this application, to form a pre-designed diastereomerically pure internucleotidic linkage with respect to the chiral linkage phosphorus. In some embodiments, at least two nucleotide units of a provided oligonucleotide are installed using stereoselective oligonucleotide synthesis, as described in this application, to form at least two pre-designed diastereomerically pure internucleotidic linkages with respect to the chiral linkage phosphorus. In some embodiments, at least three nucleotide units of a provided oligonucleotide are installed using stereoselective oligonucleotide synthesis, as described in this application, to form at least three pre-designed diastereomerically pure internucleotidic linkages with respect to the chiral linkage phosphorus. In some embodiments, the at least one, two, or three pre-designed diastereomerically pure internucleotidic linkages are adjacent to one another. In some embodiments, the at least one, two, or three pre-designed diastereomerically pure internucleotidic linkages are not adjacent to one another.

[0228] In some embodiments, at least about 5%, 10%, 15%, 20%, 25%, 30%, 35%, 40%, 45%, or 50% of nucleotide units of a provided oligonucleotide are installed using stereoselective oligonucleotide synthesis, as described in this application, to form a pre-designed diastereomerically pure internucleotidic linkage with respect to the chiral linkage phosphorus. As described herein, in some embodiments the at least about 5%, 10%, 15%, 20%, 25%, 30%, 35%, 40%, 45%, or 50% of nucleotide units occur in one or more blocks to provide a blockmer. In some embodiments, the at least about 5%, 10%, 15%, 20%, 25%, 30%, 35%, 40%, 45%, or 50% of nucleotide units occur in a an alternating pattern to provide an altmer. One of skill in the relevant arts will recognize that any desirable pattern can be achieved using methods of the present invention and are contemplated herein.

[0229] In some embodiments, the present invention provides a chirally controlled oligonucleotide, wherein at least two of the individual internucleotidic linkages within the oligonucleotide have different stereochemistry and/or different P-modifications relative to one another. In certain embodiments, the present invention provides a chirally controlled oligonucleotide, wherein at least two individual internucleotidic linkages within the oligonucleotide have different P-modifications relative to one another. In certain embodiments, the present invention provides a chirally controlled oligonucleotide, wherein at least two of the individual internucleotidic linkages within the oligonucleotide have different P-modifications relative to one another, and wherein the chirally controlled oligonucleotide comprises at least one phosphate diester internucleotidic linkage. In certain embodiments, the present invention provides a chirally controlled oligonucleotide, wherein at least two of the individual internucleotidic linkages within the oligonucleotide have different P-modifications relative to one another, and wherein the chirally controlled oligonucleotide comprises at least one phosphate diester internucleotidic linkage and at least one phosphorothioate diester internucleotidic linkage. In certain embodiments, the present invention provides a chirally controlled oligonucleotide, wherein at least two of the individual internucleotidic linkages within the oligonucleotide have different P-modifications relative to one another, and wherein the chirally controlled oligonucleotide comprises at least one phosphorothioate triester internucleotidic linkage. In certain embodiments, the present invention provides a chirally controlled oligonucleotide, wherein at least two of the individual internucleotidic linkages within the oligonucleotide have different P-modifications relative to one another, and wherein the chirally controlled oligonucleotide comprises at least one phosphate diester internucleotidic linkage and at least one phosphorothioate triester internucleotidic linkage.

[0230] In certain embodiments, the present invention provides a chirally controlled oligonucleotide comprising one or more modified internucleotidic linkages independently having the structure of formula I:

[chemical structure]

wherein each variable is as defined and described below. In some embodiments, the present invention provides a chirally controlled oligonucleotide comprising one or more modified internucleotidic linkages of formula I, and wherein individual internucleotidic linkages of formula I within the oligonucleotide have different P-modifications relative to one another. In some embodiments, the present invention provides a chirally controlled oligonucleotide comprising one or more modified internucleotidic linkages of formula I, and wherein individual internucleotidic linkages of formula I within the oligonucleotide have different —X-L-R¹ relative to one another. In some embodiments, the present invention provides a chirally controlled oligonucleotide comprising one or more modified internucleotidic linkages of formula I, and wherein individual internucleotidic linkages of formula I within the oligonucleotide have different X relative to one another. In some embodiments, the present invention provides a chirally controlled oligonucleotide comprising one or more modified internucleotidic linkages of formula I, and wherein individual internucleotidic linkages of formula I within the oligonucleotide have different -L-R¹ relative to one another.

[0231] In some embodiments, the present invention provides a chirally controlled oligonucleotide, wherein at least two of the individual internucleotidic linkages within the oligonucleotide have different stereochemistry and/or different P-modifications relative to one another. In some embodiments, the present invention provides a chirally controlled oligonucleotide, wherein at least two of the individual internucleotidic linkages within the oligonucleotide have different stereochemistry relative to one another, and wherein at least a portion of the structure of the chirally controlled oligonucleotide is characterized by a repeating pattern of alternating stereochemistry.

[0232] In some embodiments, the present invention provides a chirally controlled oligonucleotide, wherein at least two of the individual internucleotidic linkages within the oligonucleotide have different P-modifications relative to one another, in that they have different X atoms in their -XLR¹ moieties, and/or in that they have different L groups in their -XLR¹ moieties, and/or that they have different R¹ atoms in their -XLR¹ moieties.

[0233] In some embodiments, the present invention provides a chirally controlled oligonucleotide, wherein at least two of the individual internucleotidic linkages within the oligonucleotide have different stereochemistry and/or different P-modifications relative to one another and the oligonucleotide has a structure represented by the following formula:

[S^{B}n1R^{B}n2S^{B}n3R^{B}n4 . . . S^{B}nxR^{B}ny]

wherein:
each R^{B} independently represents a block of nucleotide units having the R configuration at the linkage phosphorus;
each S^{B} independently represents a block of nucleotide units having the S configuration at the linkage phosphorus;
each of n1-ny is zero or an integer, with the requirement that at least one odd n and at least one even n must be non-zero so that the oligonucleotide includes at least two individual internucleotidic linkages with different stereochemistry relative to one another; and wherein the sum of n1-ny is between 2 and 200, and in some embodiments is between a lower limit selected from the group consisting of 2, 3, 4, 5, 6, 7, 8, 9, 10, 11, 12, 13, 14, 15, 16, 17, 18, 19, 20, 21, 22, 23, 24, 25 or more and an upper limit selected from the group consisting of 5, 10, 15, 20, 25, 30, 35, 40, 45, 50, 55, 60, 65, 70, 75, 80, 85, 90, 95, 100, 110, 120, 130, 140, 150, 160, 170, 180, 190, and 200, the upper limit being larger than the lower limit.

[0234] In some such embodiments, each n has the same value; in some embodiments, each even n has the same value as each other even n; in some embodiments, each odd n has the same value each other odd n; in some embodiments, at least two even ns have different values from one another; in some embodiments, at least two odd ns have different values from one another.

[0235] In some embodiments, at least two adjacent ns are equal to one another, so that a provided oligonucleotide includes adjacent blocks of S stereochemistry linkages and R stereochemistry linkages of equal lengths. In some embodiments, provided oligonucleotides include repeating blocks of S and R stereochemistry linkages of equal lengths. In some embodiments, provided oligonucleotides include repeating blocks of S and R stereochemistry linkages, where at least two such blocks are of different lengths from one another; in some such embodiments each S stereochemistry block is of the same length, and is of a different length from each R stereochemistry length, which may optionally be of the same length as one another.

[0236] In some embodiments, at least two skip-adjacent ns are equal to one another, so that a provided oligonucleotide includes at least two blocks of linkages of a first stereochemistry that are equal in length to one another and are separated by a block of linkages of the other stereochemistry, which separating block may be of the same length or a different length from the blocks of first stereochemistry.

[0237] In some embodiments, ns associated with linkage blocks at the ends of a provided oligonucleotide are of the same length. In some embodiments, provided oligonucleotides have terminal blocks of the same linkage stereochemistry. In some such embodiments, the terminal blocks are separated from one another by a middle block of the other linkage stereochemistry.

[0238] In some embodiments, a provided oligonucleotide of formula [S^{B}n1R^{B}n2S^{B}n3R^{B}n4 . . . S^{B}nxR^{B}ny] is a stereoblockmer. In some embodiments, a provided oligonucleotide of formula [S^{B}n1R^{B}n2S^{B}n3R^{B}n4 . . . S^{B}nxR^{B}ny] is a stereoskipmer. In some embodiments, a provided oligonucleotide of formula [S^{B}n1R^{B}n2S^{B}n3R^{B}n4 . . . S^{B}nxR^{B}ny] is a stereoaltmer. In some embodiments, a provided oligonucleotide of formula [S^{B}n1R^{B}n2S^{B}n3R^{B}n4 . . . S^{B}nxR^{B}ny] is a gapmer.

[0239] In some embodiments, a provided oligonucleotide of formula [S^{B}n1R^{B}2S^{B}n3R^{B}n4 . . . S^{B}nxR^{B}ny] is of any of the above described patterns and further comprises patterns of P-modifications. For instance, in some embodiments, a provided oligonucleotide of formula [S^{B}n1R^{B}n2S^{B}n3R^{B}n4 . . . S^{B}nxR^{B}ny] and is a stereoskipmer and P-modification skipmer. In some embodiments, a provided oligonucleotide of formula [S^{B}n1R^{B}n2S^{B}n3R^{B}n4 . . . S^{B}nxR^{B}ny] and is a stereoblockmer and P-modification altmer. In some embodiments, a provided oligonucleotide of formula [S^{B}n1R^{B}n2S^{B}n3R^{B}n4 . . . S^{B}nxR^{B}ny] and is a stereoaltmer and P-modification blockmer.

[0240] In some embodiments, a provided oligonucleotide of formula [S^{B}n1R^{B}n2S^{B}n3R^{B}n4 . . . S^{B}nxR^{B}ny] is a chirally controlled oligonucleotide comprising one or more modified internucleotidic linkages independently having the structure of formula I:

[chemical structure]

wherein:
[0241] P* is an asymmetric phosphorus atom and is either Rp or Sp;
[0242] W is O, S or Se;
[0243] each of X, Y and Z is independently —O—, —S—, —N(-L-R¹)—, or L;
[0244] L is a covalent bond or an optionally substituted, linear or branched C₁-C₁₀ alkylene, wherein one or more methylene units of L are optionally and independently replaced by an optionally substituted C₁-C₆ alkylene, C₁-C₆ alkenylene, —C≡C—, —C(R′)₂—, —Cy-, —O—, —S—, —S—S—, —N(R′)—, —C(O)—, —C(S)—, —C(NR′)—, —C(O)N(R′)—, —N(R′)C(O)N(R′)—, —N(R′)C(O)—, —N(R′)C(O)O—, —OC(O)N(R′)—, —S(O)—, —S(O)₂—, —S(O)₂N(R′)—, —N(R′)S(O)₂—, —SC(O)—, —C(O)S—, —OC(O)—, or —C(O)O—;
[0245] R¹ is halogen, R, or an optionally substituted C₁-C₅₀ aliphatic wherein one or more methylene units are optionally and independently replaced by an optionally substituted C₁-C₆ alkylene, C₁-C₆ alkenylene, —C≡C—, —C(R′)₂—, —Cy-, —O—, —S—, —S—S—, —N(R′)—, —C(O)—, —C(S)—, —C(NR′)—, —C(O)N(R′)—, —N(R′)C(O)N(R′)—, —N(R′)C(O)—, —N(R′)C(O)O—, —OC(O)N(R′)—, —S(O)—, —S(O)₂—, —S(O)₂N(R′)—, —N(R′)S(O)₂—, —SC(O)—, —C(O)S—, —OC(O)—, or —C(O)O—;
[0246] each R′ is independently —R, —C(O)R, —CO₂R, or —SO₂R, or:
   [0247] two R′ on the same nitrogen are taken together with their intervening atoms to form an optionally substituted heterocyclic or heteroaryl ring, or
   [0248] two R′ on the same carbon are taken together with their intervening atoms to form an optionally substituted aryl, carbocyclic, heterocyclic, or heteroaryl ring;
[0249] —Cy- is an optionally substituted bivalent ring selected from phenylene, carbocyclylene, arylene, heteroarylene, or heterocyclylene;
[0250] each R is independently hydrogen, or an optionally substituted group selected from C₁-C₆ aliphatic, phenyl, carbocyclyl, aryl, heteroaryl, or heterocyclyl; and
[0251] each

[chemical structure]

independently represents a connection to a nucleoside.

[0252] In some embodiments, a chirally controlled oligonucleotide comprises one or more modified internucleotidic phosphorus linkages. In some embodiments, a chirally controlled oligonucleotide comprises, e.g., a phosphorothioate or a phosphorothioate triester linkage. In some embodiments, a chirally controlled oligonucleotide comprises a phosphorothioate triester linkage. In some embodiments, a chirally controlled oligonucleotide comprises at least two phosphorothioate triester linkages. In some embodiments, a chirally controlled oligonucleotide comprises at least three phosphorothioate triester linkages. In some embodiments, a chirally controlled oligonucleotide comprises at least four phosphorothioate triester linkages. In some embodiments, a chirally controlled oligonucleotide comprises at least five phosphorothioate triester linkages. Exemplary such modified internucleotidic phosphorus linkages are described further herein.

[0253] In some embodiments, a chirally controlled oligonucleotide comprises different internucleotidic phosphorus linkages. In some embodiments, a chirally controlled oligonucleotide comprises at least one phosphate diester internucleotidic linkage and at least one modified internucleotidic linkage. In some embodiments, a chirally controlled oligonucleotide comprises at least one phosphate diester internucleotidic linkage and at least one phosphorothioate triester linkage. In some embodiments, a chirally controlled oligonucleotide comprises at least one phosphate diester internucleotidic linkage and at least two phosphorothioate triester linkages. In some embodiments, a chirally controlled oligonucleotide comprises at least one phosphate diester internucleotidic linkage and at least three phosphorothioate triester linkages. In some embodiments, a chirally controlled oligonucleotide comprises at least one phosphate diester internucleotidic linkage and at least four phosphorothioate triester linkages. In some embodiments, a chirally controlled oligonucleotide comprises at least one phosphate diester internucleotidic linkage and at least five phosphorothioate triester linkages. Exemplary such modified internucleotidic phosphorus linkages are described further herein.

[0254] In some embodiments, a phosphorothioate triester linkage comprises a chiral auxiliary, which, for example, is used to control the stereoselectivity of a reaction. In some embodiments, a phosphorothioate triester linkage does not comprise a chiral auxiliary. In some embodiments, a phosphorothioate triester linkage is intentionally maintained until and/or during the administration to a subject.

[0255] In some embodiments, a chirally controlled oligonucleotide is linked to a solid support. In some embodiments, a chirally controlled oligonucleotide is cleaved from a solid support.

[0256] In some embodiments, a chirally controlled oligonucleotide comprises at least one phosphate diester internucleotidic linkage and at least two consecutive modified internucleotidic linkages. In some embodiments, a chirally controlled oligonucleotide comprises at least one phosphate diester internucleotidic linkage and at least two consecutive phosphorothioate triester internucleotidic linkages.

[0257] In some embodiments, a chirally controlled oligonucleotide is a blockmer. In some embodiments, a chirally controlled oligonucleotide is a stereoblockmer. In some embodiments, a chirally controlled oligonucleotide is a P-modification blockmer. In some embodiments, a chirally controlled oligonucleotide is a linkage blockmer.

[0258] In some embodiments, a chirally controlled oligonucleotide is an altmer. In some embodiments, a chirally controlled oligonucleotide is a stereoaltmer. In some embodiments, a chirally controlled oligonucleotide is a P-modification altmer. In some embodiments, a chirally controlled oligonucleotide is a linkage altmer.

[0259] In some embodiments, a chirally controlled oligonucleotide is a unimer. In some embodiments, a chirally controlled oligonucleotide is a stereounimer. In some embodiments, a chirally controlled oligonucleotide is a P-modification unimer. In some embodiments, a chirally controlled oligonucleotide is a linkage unimer.

[0260] In some embodiments, a chirally controlled oligonucleotide is a gapmer.

[0261] In some embodiments, a chirally controlled oligonucleotide is a skipmer.

[0262] In some embodiments, the present invention provides a chirally controlled oligonucleotide comprising one or more modified internucleotidic linkages independently having the structure of formula I:

[chemical structure]

wherein:
[0263] P* is an asymmetric phosphorus atom and is either Rp or Sp;
[0264] W is O, S or Se;
[0265] each of X, Y and Z is independently —O—, —S—, —N(-L-R¹)—, or L;
[0266] L is a covalent bond or an optionally substituted, linear or branched C₁-C₁₀ alkylene, wherein one or more methylene units of L are optionally and independently replaced by an optionally substituted C₁-C₆ alkylene, C₁-C₆ alkenylene, —C≡C—, —C(R′)₂—, —Cy-, —O—, —S—, —S—S—, —N(R′)—, —C(O)—, —C(S)—, —C(NR′)—, —C(O)N(R′)—, —N(R′)C(O)N(R′)—, —N(R′)C(O)—, —N(R′)C(O)O—, —OC(O)N(R′)—, —S(O)—, —S(O)₂—, —S(O)₂N(R′)—, —N(R′)S(O)₂—, —SC(O)—, —C(O)S—, —OC(O)—, or —C(O)O—;
[0267] R¹ is halogen, R, or an optionally substituted C₁-C₅₀ aliphatic wherein one or more methylene units are optionally and independently replaced by an optionally substituted C—C₆ alkylene, C₁-C₆ alkenylene, —C≡C—, —C(R′)₂—, —Cy-, —O—, —S—, —S—S—, —N(R′)—, —C(O)—, —C(S)—, —C(NR′)—, —C(O)N(R′)—, —N(R′)C(O)N(R′)—, —N(R′)C(O)—, —N(R′)C(O)O—, —OC(O)N(R′)—, —S(O)—, —S(O)₂—, —S(O)₂N(R′)—, —N(R′)S(O)₂—, —SC(O)—, —C(O)S—, —OC(O)—, or —C(O)O—;
[0268] each R′ is independently —R, —C(O)R, —CO₂R, or —SO₂R, or
   [0269] two R′ on the same nitrogen are taken together with their intervening atoms to form an optionally substituted heterocyclic or heteroaryl ring, or
   [0270] two R′ on the same carbon are taken together with their intervening atoms to form an optionally substituted aryl, carbocyclic, heterocyclic, or heteroaryl ring;
[0271] —Cy- is an optionally substituted bivalent ring selected from phenylene, carbocyclylene, arylene, heteroarylene, or heterocyclylene;
[0272] each R is independently hydrogen, or an optionally substituted group selected from C₁-C₆ aliphatic, phenyl, carbocyclyl, aryl, heteroaryl, or heterocyclyl; and
[0273] each

[chemical structure]

independently represents a connection to a nucleoside.

[0274] As defined generally above and herein, P* is an asymmetric phosphorus atom and is either Rp or Sp. In some embodiments, P* is Rp. In other embodiments, P* is Sp. In some embodiments, an oligonucleotide comprises one or more internucleotidic linkages of formula I wherein each P* is independently Rp or Sp. In some embodiments, an oligonucleotide comprises one or more internucleotidic linkages of formula I wherein each P* is Rp. In some embodiments, an oligonucleotide comprises one or more internucleotidic linkages of formula I wherein each P* is Sp. In some embodiments, an oligonucleotide comprises at least one internucleotidic linkage of formula I wherein P* is Rp. In some embodiments, an oligonucleotide comprises at least one internucleotidic linkage of formula I wherein P* is Sp. In some embodiments, an oligonucleotide comprises at least one internucleotidic linkage of formula I wherein P* is Rp, and at least one internucleotidic linkage of formula I wherein P* is Sp.

[0275] As defined generally above and herein, W is O, S, or Se. In some embodiments, W is O. In some embodiments, W is S. In some embodiments, W is Se. In some embodiments, an oligonucleotide comprises at least one internucleotidic linkage of formula I wherein W is O. In some embodiments, an oligonucleotide comprises at least one internucleotidic linkage of formula I wherein W is S. In some embodiments, an oligonucleotide comprises at least one internucleotidic linkage of formula I wherein W is Se.

[0276] As defined generally above and herein, each R is independently hydrogen, or an optionally substituted group selected from C₁-C₆ aliphatic, phenyl, carbocyclyl, aryl, heteroaryl, or heterocyclyl.

[0277] In some embodiments, R is hydrogen. In some embodiments, R is an optionally substituted group selected from C₁-C₆ aliphatic, phenyl, carbocyclyl, aryl, heteroaryl, or heterocyclyl.

[0278] In some embodiments, R is an optionally substituted C₁-C₆ aliphatic. In some embodiments, R is an optionally substituted C₁-C₆ alkyl. In some embodiments, R is optionally substituted, linear or branched hexyl. In some embodiments, R is optionally substituted, linear or branched pentyl. In some embodiments, R is optionally substituted, linear or branched butyl. In some embodiments, R is optionally substituted, linear or branched propyl. In some embodiments, R is optionally substituted ethyl. In some embodiments, R is optionally substituted methyl.

[0279] In some embodiments, R is optionally substituted phenyl. In some embodiments, R is substituted phenyl. In some embodiments, R is phenyl.

[0280] In some embodiments, R is optionally substituted carbocyclyl. In some embodiments, R is optionally substituted C₃-C₁₀ carbocyclyl. In some embodiments, R is optionally substituted monocyclic carbocyclyl. In some embodiments, R is optionally substituted cycloheptyl. In some embodiments, R is optionally substituted cyclohexyl. In some embodiments, R is optionally substituted cyclopentyl. In some embodiments, R is optionally substituted cyclobutyl. In some embodiments, R is an optionally substituted cyclopropyl. In some embodiments, R is optionally substituted bicyclic carbocyclyl.

[0281] In some embodiments, R is an optionally substituted aryl. In some embodiments, R is an optionally substituted bicyclic aryl ring.

[0282] In some embodiments, R is an optionally substituted heteroaryl. In some embodiments, R is an optionally substituted 5-6 membered monocyclic heteroaryl ring having 1-3 heteroatoms independently selected from nitrogen, sulfur, or oxygen. In some embodiments, R is a substituted 5-6 membered monocyclic heteroaryl ring having 1-3 heteroatoms independently selected from nitrogen, oxygen, or sulfur. In some embodiments, R is an unsubstituted 5-6 membered monocyclic heteroaryl ring having 1-3 heteroatoms independently selected from nitrogen, sulfur, or oxygen.

[0283] In some embodiments, R is an optionally substituted 5 membered monocyclic heteroaryl ring having 1-3 heteroatoms independently selected from nitrogen, oxygen or sulfur. In some embodiments, R is an optionally substituted 6 membered monocyclic heteroaryl ring having 1-3 heteroatoms independently selected from nitrogen, oxygen, or sulfur.

[0284] In some embodiments, R is an optionally substituted 5-membered monocyclic heteroaryl ring having 1 heteroatom selected from nitrogen, oxygen, or sulfur. In some embodiments, R is selected from pyrrolyl, furanyl, or thienyl.

[0285] In some embodiments, R is an optionally substituted 5-membered heteroaryl ring having 2 heteroatoms independently selected from nitrogen, oxygen, or sulfur. In certain embodiments, R is an optionally substituted 5-membered heteroaryl ring having 1 nitrogen atom, and an additional heteroatom selected from sulfur or oxygen. Exemplary R groups include optionally substituted pyrazolyl, imidazolyl, thiazolyl, isothiazolyl, oxazolyl or isoxazolyl.

[0286] In some embodiments, R is a 6-membered heteroaryl ring having 1-3 nitrogen atoms. In other embodiments, R is an optionally substituted 6-membered heteroaryl ring having 1-2 nitrogen atoms. In some embodiments, R is an optionally substituted 6-membered heteroaryl ring having 2 nitrogen atoms. In certain embodiments, R is an optionally substituted 6-membered heteroaryl ring having 1 nitrogen. Exemplary R groups include optionally substituted pyridinyl, pyrimidinyl, pyrazinyl, pyridazinyl, triazinyl, or tetrazinyl.

[0287] In certain embodiments, R is an optionally substituted 8-10 membered bicyclic heteroaryl ring having 1-4 heteroatoms independently selected from nitrogen, oxygen, or sulfur. In some embodiments, R is an optionally substituted 5,6-fused heteroaryl ring having 1-4 heteroatoms independently selected from nitrogen, oxygen, or sulfur. In other embodiments, R is an optionally substituted 5,6-fused heteroaryl ring having 1-2 heteroatoms independently selected from nitrogen, oxygen, or sulfur. In certain embodiments, R is an optionally substituted 5,6-fused heteroaryl ring having 1 heteroatom independently selected from nitrogen, oxygen, or sulfur. In some embodiments, R is an optionally substituted indolyl. In some embodiments, R is an optionally substituted azabicyclo[3.2.1]octanyl. In certain embodiments, R is an optionally substituted 5,6-fused heteroaryl ring having 2 heteroatoms independently selected from nitrogen, oxygen, or sulfur. In some embodiments, R is an optionally substituted azaindolyl. In some embodiments, R is an optionally substituted benzimidazolyl. In some embodiments, R is an optionally substituted benzothiazolyl. In some embodiments, R is an optionally substituted benzoxazolyl. In some embodiments, R is an optionally substituted indazolyl. In certain embodiments, R is an optionally substituted 5,6-fused heteroaryl ring having 3 heteroatoms independently selected from nitrogen, oxygen, or sulfur.

[0288] In certain embodiments, R is an optionally substituted 6,6-fused heteroaryl ring having 1-4 heteroatoms independently selected from nitrogen, oxygen, or sulfur. In some embodiments, R is an optionally substituted 6,6-fused heteroaryl ring having 1-2 heteroatoms independently selected from nitrogen, oxygen, or sulfur. In other embodiments, R is an optionally substituted 6,6-fused heteroaryl ring having 1 heteroatom independently selected from nitrogen, oxygen, or sulfur. In some embodiments, R is an optionally substituted quinolinyl. In some embodiments, R is an optionally substituted isoquinolinyl. According to one aspect, R is an optionally substituted 6,6-fused heteroaryl ring having 2 heteroatoms independently selected from nitrogen, oxygen, or sulfur. In some embodiments, R is a quinazoline or a quinoxaline.

[0289] In some embodiments, R is an optionally substituted heterocyclyl. In some embodiments, R is an optionally substituted 3-7 membered saturated or partially unsaturated heterocyclic ring having 1-2 heteroatoms independently selected from nitrogen, oxygen, or sulfur. In some embodiments, R is a substituted 3-7 membered saturated or partially unsaturated heterocyclic ring having 1-2 heteroatoms independently selected from nitrogen, oxygen, or sulfur. In some embodiments, R is an unsubstituted 3-7 membered saturated or partially unsaturated heterocyclic ring having 1-2 heteroatoms independently selected from nitrogen, oxygen, or sulfur.

[0290] In some embodiments, R is an optionally substituted heterocyclyl. In some embodiments, R is an optionally substituted 6 membered saturated or partially unsaturated heterocyclic ring having 1-2 heteroatoms independently selected from nitrogen, oxygen, or sulfur. In some embodiments, R is an optionally substituted 6 membered partially unsaturated heterocyclic ring having 2 heteroatoms independently selected from nitrogen, oxygen, or sulfur. In some embodiments, R is an optionally substituted 6 membered partially unsaturated heterocyclic ring having 2 oxygen atom.

[0291] In certain embodiments, R is a 3-7 membered saturated or partially unsaturated heterocyclic ring having 1-2 heteroatoms independently selected from nitrogen, oxygen, or sulfur. In certain embodiments, R is oxiranyl, oxetanyl, tetrahydrofuranyl, tetrahydropyranyl, oxepaneyl, aziridineyl, azetidineyl, pyrrolidinyl, piperidinyl, azepanyl, thiiranyl, thietanyl, tetrahydrothiophenyl, tetrahydrothiopyranyl, thiepanyl, dioxolanyl, oxathiolanyl, oxazolidinyl, imidazolidinyl, thiazolidinyl, dithiolanyl, dioxanyl, morpholinyl, oxathianyl, piperazinyl, thiomorpholinyl, dithianyl, dioxepanyl, oxazepanyl, oxathiepanyl, dithiepanyl, diazepanyl, dihydrofuranonyl, tetrahydropyranonyl, oxepanonyl, pyrolidinonyl, piperidinonyl, azepanonyl, dihydrothiophenonyl, tetrahydrothiopyranonyl, thiepanonyl, oxazolidinonyl, oxazinanonyl, oxazepanonyl, dioxolanonyl, dioxanonyl, dioxepanonyl, oxathiolinonyl, oxathianonyl, oxathiepanonyl, thiazolidinonyl, thiazinanonyl, thiazepanonyl, imidazolidinonyl, tetrahydropyrimidinonyl, diazepanonyl, imidazolidinedionyl, oxazolidinedionyl, thiazolidinedionyl, dioxolanedionyl, oxathiolanedionyl, piperazinedionyl, morpholinedionyl, thiomorpholinedionyl, tetrahydropyranyl, tetrahydrofuranyl, morpholinyl, thiomorpholinyl, piperidinyl, piperazinyl, pyrrolidinyl, tetrahydrothiophenyl, or tetrahydrothiopyranyl. In some embodiments, R is an optionally substituted 5 membered saturated or partially unsaturated heterocyclic ring having 1-2 heteroatoms independently selected from nitrogen, oxygen, or sulfur.

[0292] In certain embodiments, R is an optionally substituted 5-6 membered partially unsaturated monocyclic ring having 1-2 heteroatoms independently selected from nitrogen, oxygen, or sulfur. In certain embodiments, R is an optionally substituted tetrahydropyridinyl, dihydrothiazolyl, dihydrooxazolyl, or oxazolinyl group.

[0293] In some embodiments, R is an optionally substituted 8-10 membered bicyclic saturated or partially unsaturated heterocyclic ring having 1-4 heteroatoms independently selected from nitrogen, oxygen, or sulfur. In some embodiments, R is an optionally substituted indolinyl. In some embodiments, R is an optionally substituted isoindolinyl. In some embodiments, R is an optionally substituted 1, 2, 3, 4-tetrahydroquinoline. In some embodiments, R is an optionally substituted 1, 2, 3, 4-tetrahydroisoquinoline.

[0294] As defined generally above and herein, each R′ is independently —R, —C(O)R, —CO₂R, or —SO₂R, or:
[0295] two R′ on the same nitrogen are taken together with their intervening atoms to form an optionally substituted heterocyclic or heteroaryl ring, or
[0296] two R′ on the same carbon are taken together with their intervening atoms to form an optionally substituted aryl, carbocyclic, heterocyclic, or heteroaryl ring.

[0297] In some embodiments, R′ is —R, —C(O)R, —CO₂R, or —SO₂R, wherein R is as defined above and described herein.

[0298] In some embodiments, R′ is —R, wherein R is as defined and described above and herein. In some embodiments, R′ is hydrogen.

[0299] In some embodiments, R′ is —C(O)R, wherein R is as defined above and described herein. In some embodiments, R′ is —CO₂R, wherein R is as defined above and described herein. In some embodiments, R′ is —SO₂R, wherein R is as defined above and described herein.

[0300] In some embodiments, two R′ on the same nitrogen are taken together with their intervening atoms to form an optionally substituted heterocyclic or heteroaryl ring. In some embodiments, two R′ on the same carbon are taken together with their intervening atoms to form an optionally substituted aryl, carbocyclic, heterocyclic, or heteroaryl ring.

[0301] As defined generally above and herein, —Cy- is an optionally substituted bivalent ring selected from phenylene, carbocyclylene, arylene, heteroarylene, or heterocyclylene.

[0302] In some embodiments, —Cy- is optionally substituted phenylene. In some embodiments, —Cy- is optionally substituted carbocyclylene. In some embodiments, —Cy- is optionally substituted arylene. In some embodiments, —Cy- is optionally substituted heteroarylene. In some embodiments, —Cy- is optionally substituted heterocyclylene.

[0303] As defined generally above and herein, each of X, Y and Z is independently —O—, —S—, —N(-L-R¹)—, or L, wherein each of L and R′ is independently as defined above and described below.

[0304] In some embodiments, X is —O—. In some embodiments, X is —S—. In some embodiments, X is —O— or —S—. In some embodiments, an oligonucleotide comprises at least one internucleotidic linkage of formula I wherein X is —O—. In some embodiments, an oligonucleotide comprises at least one internucleotidic linkage of formula I wherein X is —S—. In some embodiments, an oligonucleotide comprises at least one internucleotidic linkage of formula I wherein X is —O—, and at least one internucleotidic linkage of formula I wherein X is —S—. In some embodiments, an oligonucleotide comprises at least one internucleotidic linkage of formula I wherein X is —O—, and at least one internucleotidic linkage of formula I wherein X is —S—, and at least one internucleotidic linkage of formula I wherein L is an optionally substituted, linear or branched C₁-C₁₀ alkylene, wherein one or more methylene units of L are optionally and independently replaced by an optionally substituted C₁-C₆ alkylene, C₁-C₆ alkenylene, —C≡C—, —C(R′)₂—, —Cy-, —O—, —S—, —S—S—, —N(R′)—, —C(O)—, —C(S)—, —C(NR′)—, —C(O)N(R′)—, —N(R′)C(O)N(R′)—, —N(R′)C(O)—, —N(R′)C(O)O—, —OC(O)N(R′)—, —S(O)—, —S(O)₂—, —S(O)₂N(R′)—, —N(R′)S(O)₂—, —SC(O)—, —C(O)S—, —OC(O)—, or —C(O)O—.

[0305] In some embodiments, X is —N(-L-R¹)—. In some embodiments, X is —N(R¹)—. In some embodiments, X is —N(R′)—. In some embodiments, X is —N(R)—. In some embodiments, X is —NH—.

[0306] In some embodiments, X is L. In some embodiments, X is a covalent bond. In some embodiments, X is or an optionally substituted, linear or branched C₁-C₁₀ alkylene, wherein one or more methylene units of L are optionally and independently replaced by an optionally substituted C₁-C₆ alkylene, C₁—C % alkenylene, —C≡C—, —C(R′)₂—, —Cy-, —O—, —S—, —S—S—, —N(R′)—, —C(O)—, —C(S)—, —C(NR′)—, —C(O)N(R′)—, —N(R′)C(O)N(R′)—, —N(R′)C(O)—, —N(R′)C(O)O—, —OC(O)N(R′)—, —S(O)—, —S(O)₂—, —S(O)₂N(R′)—, —N(R′)S(O)₂—, —SC(O)—, —C(O)S—, —OC(O)—, or —C(O)O—. In some embodiments, X is an optionally substituted C₁-C₁₀ alkylene or C₁-C₁₀ alkenylene. In some embodiments, X is methylene.

[0307] In some embodiments, Y is —O—. In some embodiments, Y is —S—.

[0308] In some embodiments, Y is —N(-L-R¹)—. In some embodiments, Y is —N(R¹)—. In some embodiments, Y is —N(R′)—. In some embodiments, Y is —N(R)—. In some embodiments, Y is —NH—.

[0309] In some embodiments, Y is L. In some embodiments, Y is a covalent bond. In some embodiments, Y is or an optionally substituted, linear or branched C₁-C₁₀ alkylene, wherein one or more methylene units of L are optionally and independently replaced by an optionally substituted C₁-C₆ alkylene, C₁-C₆ alkenylene, —C≡C—, —C(R′)₂—, —Cy-, —O—, —S—, —S—S—, —N(R′)—, —C(O)—, —C(S)—, —C(NR′)—, —C(O)N(R′)—, —N(R′)C(O)N(R′)—, —N(R′)C(O)—, —N(R′)C(O)O—, —OC(O)N(R′)—, —S(O)—, —S(O)₂—, —S(O)₂N(R′)—, —N(R′)S(O)₂—, —SC(O)—, —C(O)S—, —OC(O)—, or —C(O)O—. In some embodiments, Y is an optionally substituted C₁-C₁₀ alkylene or C₁-C₁₀ alkenylene. In some embodiments, Y is methylene.

[0310] In some embodiments, Z is —O—. In some embodiments, Z is —S—.

[0311] In some embodiments, Z is —N(-L-R¹)—. In some embodiments, Z is —N(R¹)—. In some embodiments, Z is —N(R′)—. In some embodiments, Z is —N(R)—. In some embodiments, Z is —NH—.

[0312] In some embodiments, Z is L. In some embodiments, Z is a covalent bond. In some embodiments, Z is or an optionally substituted, linear or branched C₁-C₁₀ alkylene, wherein one or more methylene units of L are optionally and independently replaced by an optionally substituted C₁-C₆ alkylene, C₁-C₆ alkenylene, —C≡C—, —C(R′)₂—, —Cy-, —O—, —S—, —S—S—, —N(R′)—, —C(O)—, —C(S)—, —C(NR′)—, —C(O)N(R′)—, —N(R′)C(O)N(R′)—, —N(R′)C(O)—, —N(R′)C(O)O—, —OC(O)N(R′)—, —S(O)—, —S(O)₂—, —S(O)₂N(R′)—, —N(R′)S(O)₂—, —SC(O)—, —C(O)S—, —OC(O)—, or —C(O)O—. In some embodiments, Z is an optionally substituted C₁-C₁₀ alkylene or C₁-C₁₀ alkenylene. In some embodiments, Z is methylene.

[0313] As defined generally above and herein, L is a covalent bond or an optionally substituted, linear or branched C₁-C₁₀ alkylene, wherein one or more methylene units of L are optionally and independently replaced by an optionally substituted C₁-C₆ alkylene, C₁-C₆ alkenylene, —C≡C—, —C(R′)₂—, —Cy-, —O—, —S—, —S—S—, —N(R′)—, —C(O)—, —C(S)—, —C(NR′)—, —C(O)N(R′)—, —N(R′)C(O)N(R′)—, —N(R′)C(O)—, —N(R′)C(O)O—, —OC(O)N(R′)—, —S(O)—, —S(O)₂—, —S(O)₂N(R′)—, —N(R′)S(O)₂—, —SC(O)—, —C(O)S—, —OC(O)—, or —C(O)O—.

[0314] In some embodiments, L is a covalent bond. In some embodiments, L is an optionally substituted, linear or branched C₁-C₁₀ alkylene, wherein one or more methylene units of L are optionally and independently replaced by an optionally substituted C₁-C₆ alkylene, C₁-C₆ alkenylene, —C≡C—, —C(R′)₂—, —Cy-, —O—, —S—, —S—S—, —N(R′)—, —C(O)—, —C(S)—, —C(NR′)—, —C(O)N(R′)—, —N(R′)C(O)N(R′)—, —N(R′)C(O)—, —N(R′)C(O)O—, —OC(O)N(R′)—, —S(O)—, —S(O)₂—, —S(O)₂N(R′)—, —N(R′)S(O)₂—, —SC(O)—, —C(O)S—, —OC(O)—, or —C(O)O—.

[0315] In some embodiments, L has the structure of -L¹-V—, wherein:

L¹ is an optionally substituted group selected from

[chemical structure]

C₁-C₆ alkylene, C₁-C₆ alkenylene, carbocyclylene, arylene, C₁-C₆ heteroalkylene, heterocyclylene, and heteroarylene;
V is selected from —O—, —S—, —NR′—, C(R′)₂, —S—S—, —B—S—S—C—,

[chemical structure]

or an optionally substituted group selected from C₁-C₆ alkylene, arylene, C₁-C₆ heteroalkylene, heterocyclylene, and heteroarylene;

### A is ═O, ═S, ═NR′, or ═C(R′)₂;

[0316] each of B and C is independently —O—, —S—, —NR′—, —C(R′)₂—, or an optionally substituted group selected from C₁-C₆ alkylene, carbocyclylene, arylene, heterocyclylene, or heteroarylene; and
each R′ is independently as defined above and described herein.

[0317] In some embodiments, L¹ is

[chemical structure]

[0318] In some embodiments, L¹ is

[chemical structure]

wherein Ring Cy′ is an optionally substituted arylene, carbocyclylene, heteroarylene, or heterocyclylene. In some embodiments, L¹ is optionally substituted

[chemical structure]

In some embodiments, L¹ is

[chemical structure]

[0319] In some embodiments, L¹ is connected to X. In some embodiments, L¹ is an optionally substituted group selected from

[chemical structure]

and the sulfur atom is connect to V. In some embodiments L¹ is an optionally substituted group selected from

[chemical structure]

and the carbon atom is connect to X.

[0320] In some embodiments, L has the structure of:

[chemical structure]

wherein:
[0321] E is —O—, —S—, —NR′— or —C(R′)₂—;
[0322] [symbol] is a single or double bond;
[0323] the two R^{L1} are taken together with the two carbon atoms to which they are bound to form an optionally substituted aryl, carbocyclic, heteroaryl or heterocyclic ring; and each R′ is independently as defined above and described herein.

[0324] In some embodiments, L has the structure of:

[chemical structure]

wherein:
[0325] G is —O—, —S—, or —NR′;
[0326] [symbol] is a single or double bond; and
[0327] the two R^{L1} are taken together with the two carbon atoms to which they are bound to form an optionally substituted aryl, C₃-C₁₀ carbocyclic, heteroaryl or heterocyclic ring.

[0328] In some embodiments, L has the structure of:

[chemical structure]

wherein:
[0329] E is —O—, —S—, —NR′— or —C(R′)₂—;
[0330] D is ═N—, ═C(F)—, ═C(Cl)—, ═C(Br)—, ═C(I)—, ═C(CN)—, ═C(NO₂)—, ═C(CO₂—(C₁-C₆ aliphatic))-, or ═C(CF₃)—; and
[0331] each R′ is independently as defined above and described herein.

[0332] In some embodiments, L has the structure of:

[chemical structure]

wherein:
[0333] G is —O—, —S—, or —NR′;
[0334] D is ═N—, ═C(F)—, ═C(Cl)—, ═C(Br)—, ═C(I)—, ═C(CN)—, ═C(NO₂)—, ═C(CO₂—(C₁-C₆ aliphatic))- or ═C(CF₃)—.

[0335] In some embodiments, L has the structure of:

[chemical structure]

wherein:
[0336] E is —O—, —S—, —NR′— or —C(R′)₂—;
[0337] D is ═N—, ═C(F)—, ═C(Cl)—, ═C(Br)—, ═C(I)—, ═C(CN)—, ═C(NO₂)—, ═C(CO₂—(C₁-C₆ aliphatic))-, or ═C(CF₃)—; and
   each R′ is independently as defined above and described herein.

[0338] In some embodiments, L has the structure of:

[chemical structure]

wherein:
[0339] G is —O—, —S—, or —NR′;
[0340] D is ═N—, ═C(F)—, ═C(Cl)—, ═C(Br)—, ═C(I)—, ═C(CN)—, ═C(NO₂)—, ═C(CO₂—(C₁-C₆ aliphatic))-, or ═C(CF₃)—.

[0341] In some embodiments L has the structure of:

[chemical structure]

wherein:
[0342] E is —O—, —S—, —NR′— or —C(R′)₂—;
[0343] [symbol] is a single or double bond;
[0344] the two R^{L1} are taken together with the two carbon atoms to which they are bound to form an optionally substituted aryl, C₃-C₁₀ carbocyclic, heteroaryl or heterocyclic ring; and each R′ is independently as defined above and described herein.

[0345] In some embodiments, L has the structure of:

[chemical structure]

wherein:
[0346] G is —O—, —S—, or —NR′;
[0347] [symbol] is a single or double bond;
[0348] the two R^{L1} are taken together with the two carbon atoms to which they are bound to form an optionally substituted aryl, C₃-C₁₀ carbocyclic, heteroaryl or heterocyclic ring; and each R′ is independently as defined above and described herein.

[0349] In some embodiments, L has the structure of:

[chemical structure]

wherein:
[0350] E is —O—, —S—, —NR′— or —C(R′)₂—;
[0351] D is ═N—, ═C(F)—, ═C(Cl)—, ═C(Br)—, ═C(I)—, ═C(CN)—, ═C(NO₂)—, ═C(CO₂—(C₁-C₆ aliphatic))-, or ═C(CF₃)—; and
[0352] each R′ is independently as defined above and described herein.

[0353] In some embodiments, L has the structure of:

[chemical structure]

wherein:
[0354] G is —O—, —S—, or —NR′;
[0355] D is ═N—, ═C(F)—, ═C(Cl)—, ═C(Br)—, ═C(I)—, ═C(CN)—, ═C(NO₂)—, ═C(CO₂—(C₁-C₆ aliphatic))-, or ═C(CF₃)—; and
[0356] each R′ is independently as defined above and described herein.

[0357] In some embodiments, L has the structure of:

[chemical structure]

wherein:
[0358] E is —O—, —S—, —NR′— or —C(R′)₂—;
[0359] D is ═N—, ═C(F)—, ═C(Cl)—, ═C(Br)—, ═C(I)—, ═C(CN)—, ═C(NO₂)—, ═C(CO₂—(C₁-C₆ aliphatic))-, or ═C(CF₃)—; and
[0360] each R′ is independently as defined above and described herein.

[0361] In some embodiments, L has the structure of:

[chemical structure]

wherein:
[0362] G is —O—, —S—, or —NR′;
[0363] D is ═N—, ═C(F)—, ═C(Cl)—, ═C(Br)—, ═C(I)—, ═C(CN)—, ═C(NO₂)—, ═C(CO₂—(C₁-C₆ aliphatic))-, or ═C(CF₃)—; and
[0364] each R′ is independently as defined above and described herein.

[0365] In some embodiments, L has the structure of:

[chemical structure]

wherein:
[0366] E is —O—, —S—, —NR′— or —C(R′)₂—;
[0367] [symbol] is a single or double bond;
[0368] the two R^{L1} are taken together with the two carbon atoms to which they are bound to form an optionally substituted aryl, C₃-C₁₀ carbocyclic, heteroaryl or heterocyclic ring; and each R′ is independently as defined above and described herein.

[0369] In some embodiments, L has the structure of:

[chemical structure]

wherein:
[0370] G is —O—, —S—, or —NR′;
[0371] [symbol] is a single or double bond;
[0372] the two R^{L1} are taken together with the two carbon atoms to which they are bound to form an optionally substituted aryl, C₃-C₁₀ carbocyclic, heteroaryl or heterocyclic ring; and each R′ is independently as defined above and described herein.

[0373] In some embodiments, L has the structure of:

[chemical structure]

wherein:
[0374] E is —O—, —S—, —NR′— or —C(R′)₂—;
[0375] D is ═N—, ═C(F)—, ═C(Cl)—, ═C(Br)—, ═C(I)—, ═C(CN)—, ═C(NO₂)—, ═C(CO₂—(C₁-C₆ aliphatic))-, or ═C(CF₃)—; and
[0376] each R′ is independently as defined above and described herein.

[0377] In some embodiments L has the structure of:

[chemical structure]

wherein:
[0378] G is —O—, —S—, or —NR′;
[0379] D is ═N—, ═C(F)—, ═C(Cl)—, ═C(Br)—, ═C(I)—, ═C(CN)—, ═C(NO₂)—, ═C(CO₂—(C₁-C₆ aliphatic))-, or ═C(CF₃)—; and
[0380] R′ is as defined above and described herein.

[0381] In some embodiments, L has the structure of:

[chemical structure]

wherein:
[0382] E is —O—, —S—, —NR′— or —C(R′)₂—;
[0383] D is ═N—, ═C(F)—, ═C(Cl)—, ═C(Br)—, ═C(I)—, ═C(CN)—, ═C(NO₂)—, ═C(CO₂—(C₁-C₆ aliphatic))-, or ═C(CF₃)—; and
[0384] each R′ is independently as defined above and described herein.

[0385] In some embodiments, L has the structure of:

[chemical structure]

wherein:
[0386] G is —O—, —S—, or —NR′;
[0387] D is ═N—, ═C(F)—, ═C(Cl)—, ═C(Br)—, ═C(I)—, ═C(CN)—, ═C(NO₂)—, ═C(CO₂—(C₁-C₆ aliphatic))-, or ═C(CF₃)—; and
[0388] R′ is as defined above and described herein.

[0389] In some embodiments, L has the structure of:

[chemical structure]

wherein the phenyl ring is optionally substituted. In some embodiments, the phenyl ring is not substituted. In some embodiments, the phenyl ring is substituted.

[0390] In some embodiments, L has the structure of:

[chemical structure]

wherein the phenyl ring is optionally substituted. In some embodiments, the phenyl ring is not substituted. In some embodiments, the phenyl ring is substituted.

[0391] In some embodiments, L has the structure of:

[chemical structure]

wherein:
[0392] [symbol] is a single or double bond; and
[0393] the two R^{L1} are taken together with the two carbon atoms to which they are bound to form an optionally substituted aryl, C₃-C₁₀ carbocyclic, heteroaryl or heterocyclic ring.

[0394] In some embodiments, L has the structure of:

[chemical structure]

wherein:
[0395] G is —O—, —S—, or —NR′;
[0396] [symbol] is a single or double bond; and
[0397] the two R^{L1} are taken together with the two carbon atoms to which they are bound to form an optionally substituted aryl, C₃-C₁₀ carbocyclic, heteroaryl or heterocyclic ring.

[0398] As defined generally above and herein, E is —O—, —S—, —NR′— or —C(R′)₂—, wherein each R′ independently as defined above and described herein. In some embodiments, E is —O—, —S—, or —NR′—. In some embodiments, E is —O—, —S—, or —NH—. In some embodiments, E is —O—. In some embodiments, E is —S—. In some embodiments, E is —NH—.

[0399] As defined generally above and herein, G is —O—, —S—, or —NR′, wherein each R′ independently as defined above and described herein. In some embodiments, G is —O—, —S—, or —NH—. In some embodiments, G is —O—. In some embodiments, G is —S—. In some embodiments, G is —NH—.

[0400] In some embodiments, L is -L³-G-, wherein:
[0401] L³ is an optionally substituted C₁-C₅ alkylene or alkenylene, wherein one or more methylene units are optionally and independently replaced by —O—, —S—, —N(R′)—, —C(O)—, —C(S)—, —C(NR′)—, —S(O)—, —S(O)₂—, or

[chemical structure]

and
wherein each of G, R′ and Ring Cy′ is independently as defined above and described herein.

[0402] In some embodiments, L is -L³-S—, wherein L³ is as defined above and described herein. In some embodiments, L is -L³-O—, wherein L³ is as defined above and described herein. In some embodiments, L is -L³-N(R′)—, wherein each of L³ and R′ is independently as defined above and described herein. In some embodiments, L is -L³-NH—, wherein each of L³ and R′ is independently as defined above and described herein.

[0403] In some embodiments, L³ is an optionally substituted Cₛ alkylene or alkenylene, wherein one or more methylene units are optionally and independently replaced by —O—, —S—, —N(R′)—, —C(O)—, —C(S)—, —C(NR′)—, —S(O)—, —S(O)₂—, or

[chemical structure]

and each of R′ and Ring Cy′ is independently as defined above and described herein. In some embodiments, L³ is an optionally substituted C₅ alkylene. In some embodiments, -L³-G- is

[chemical structure]

[0404] In some embodiments, L³ is an optionally substituted C₁₋₄ alkylene or alkenylene, wherein one or more methylene units are optionally and independently replaced by —O—, —S—, —N(R′)—, —C(O)—, —C(S)—, —C(NR′)—, —S(O)—, —S(O)₂—, or

[chemical structure]

and each of R′ and Cy′ is independently as defined above and described herein.

[0405] In some embodiments, -L³-G- is

[chemical structure]

[0406] In some embodiments, L³ is an optionally substituted C₃ alkylene or alkenylene, wherein one or more methylene units are optionally and independently replaced by —O—, —S—, —N(R′)—, —C(O)—, —C(S)—, —C(NR′)—, —S(O)—, —S(O)₂—, or

[chemical structure]

and each of R′ and Cy′ is independently as defined above and described herein.

[0407] In some embodiments, -L³-G- is

[chemical structure]

[0408] In some embodiments, L is

[chemical structure]

In some embodiments, L is

[chemical structure]

In some embodiments, L is

[chemical structure]

[0409] In some embodiments, L³ is an optionally substituted C₂ alkylene or alkenylene, wherein one or more methylene units are optionally and independently replaced by —O—, —S—, —N(R′)—, —C(O)—, —C(S)—, —C(NR′)—, —S(O)—, —S(O)₂—, or

[chemical structure]

and each of R′ and Cy′ is independently as defined above and described herein.

[0410] In some embodiments, -L³-G- is

[chemical structure]

wherein each of G and Cy′ is independently as defined above and described herein. In some embodiments, L is

[chemical structure]

[0411] In some embodiments, L is -L⁴-G-, wherein L⁴ is an optionally substituted C₁-C₂ alkylene; and G is as defined above and described herein. In some embodiments, L is -L⁴-G-, wherein L⁴ is an optionally substituted C₁-C₂ alkylene; G is as defined above and described herein; and G is connected to R¹. In some embodiments, L is -L⁴-G-, wherein L⁴ is an optionally substituted methylene; G is as defined above and described herein; and G is connected to R¹. In some embodiments, L is -L⁴-G-, wherein L⁴ is methylene; G is as defined above and described herein; and G is connected to R¹. In some embodiments, L is -L⁴-G-, wherein L⁴ is an optionally substituted —(CH₂)₂—; G is as defined above and described herein; and G is connected to R¹. In some embodiments, L is -L⁴-G-, wherein L⁴ is —(CH₂)₂—; G is as defined above and described herein; and G is connected to R¹.

[0412] In some embodiments, L is

[chemical structure]

wherein G is as defined above and described herein, and G is connected to R¹. In some embodiments, L is

[chemical structure]

wherein G is as defined above and described herein, and G is connected to R¹. In some embodiments, L is

[chemical structure]

wherein G is as defined above and described herein, and G is connected to R¹. In some embodiments, L is

[chemical structure]

wherein the sulfur atom is connected to R¹. In some embodiments, L is

[chemical structure]

wherein the oxygen atom is connected to R¹.

[0413] In some embodiments, L is

[chemical structure]

wherein G is as defined above and described herein.

[0414] In some embodiments, L is —S—R^{L3}- or —S—C(O)—R^{L3}—, wherein R^{L3} is an optionally substituted, linear or branched, C₁-C₉ alkylene, wherein one or more methylene units are optionally and independently replaced by an optionally substituted C₁-C₆ alkylene, C₁-C₆ alkenylene, —C≡C—, —C(R′)₂—, —Cy-, —O—, —S—, —S—S—, —N(R′)—, —C(O)—, —C(S)—, —C(NR′)—, —C(O)N(R′)—, —N(R′)C(O)N(R′)—, —N(R′)C(O)—, —N(R′)C(O)O—, —OC(O)N(R′)—, —S(O)—, —S(O)₂—, —S(O)₂N(R′)—, —N(R′)S(O)₂—, —SC(O)—, —C(O)S—, —OC(O)—, or —C(O)O—, wherein each of R′ and -Cy- is independently as defined above and described herein. In some embodiments, L is —S—R^{L3}— or —S—C(O)—R^{L3}—, wherein R^{L3} is an optionally substituted C₁-C₆ alkylene. In some embodiments, L is —S—R^{L3}— or —S—C(O)—R^{L3}—, wherein R^{L3} is an optionally substituted C₁-C₆ alkenylene. In some embodiments, L is —S—R^{L3}— or —S—C(O)—R^{L3}—, wherein R^{L3} is an optionally substituted C₁-C₆ alkylene wherein one or more methylene units are optionally and independently replaced by an optionally substituted C₁-C₆ alkenylene, arylene, or heteroarylene. In some embodiments, In some embodiments, R^{L3} is an optionally substituted —S—(C₁-C₆ alkenylene)-, —S—(C₁-C₆ alkylene)-, —S—(C₁-C₆ alkylene)-arylene-(C₁-C₆ alkylene)-, —S—CO-arylene-(C₁-C₆ alkylene)-, or —S—CO—(C₁-C₆ alkylene)-arylene-(C₁-C₆ alkylene)-.

[0415] In some embodiments, L is

[chemical structure]

[0416] In some embodiments, L is

[chemical structure]

In some embodiments, L is

[chemical structure]

In some embodiments,

[chemical structure]

[0417] In some embodiments, the sulfur atom in the L embodiments described above and herein is connected to X. In some embodiments, the sulfur atom in the L embodiments described above and herein is connected to R¹.

[0418] As defined generally above and herein, R¹ is halogen, R, or an optionally substituted C₁-C₅₀ aliphatic wherein one or more methylene units are optionally and independently replaced by an optionally substituted C₁-C₆ alkylene, C₁-C₆ alkenylene, —C≡C—, —C(R′)₂—, —Cy-, —O—, —S—, —S—S—, —N(R′)—, —C(O)—, —C(S)—, —C(NR′)—, —C(O)N(R′)—, —N(R′)C(O)N(R′)—, —N(R′)C(O)—, —N(R′)C(O)O—, —OC(O)N(R′)—, —S(O)—, —S(O)₂—, —S(O)₂N(R′)—, —N(R′)S(O)₂—, —SC(O)—, —C(O)S—, —OC(O)—, or —C(O)O—, wherein each variable is independently as defined above and described herein. In some embodiments, R¹ is halogen, R, or an optionally substituted C₁-C₁₀ aliphatic wherein one or more methylene units are optionally and independently replaced by an optionally substituted C₁-C₆ alkylene, C₁-C₆ alkenylene, —C≡C—, —C(R′)₂—, —Cy-, —O—, —S—, —S—S—, —N(R′)—, —C(O)—, —C(S)—, —C(NR′)—, —C(O)N(R′)—, —N(R′)C(O)N(R′)—, —N(R′)C(O)—, —N(R′)C(O)O—, —OC(O)N(R′)—, —S(O)—, —S(O)₂—, —S(O)₂N(R′)—, —N(R′)S(O)₂—, —SC(O)—, —C(O)S—, —OC(O)—, or —C(O)O—, wherein each variable is independently as defined above and described herein.

[0419] In some embodiments, R¹ is hydrogen. In some embodiments, R¹ is halogen. In some embodiments, R¹ is —F. In some embodiments, R¹ is —Cl. In some embodiments, R¹ is —Br. In some embodiments, R¹ is —I.

[0420] In some embodiments, R¹ is R wherein R is as defined above and described herein.

[0421] In some embodiments, R¹ is hydrogen. In some embodiments, R¹ is an optionally substituted group selected from C₁-C₅₀ aliphatic, phenyl, carbocyclyl, aryl, heteroaryl, or heterocyclyl.

[0422] In some embodiments, R¹ is an optionally substituted C₁-C₅₀ aliphatic. In some embodiments, R¹ is an optionally substituted C₁-C₁₀ aliphatic. In some embodiments, R¹ is an optionally substituted C₁-C₆ aliphatic. In some embodiments, R¹ is an optionally substituted C₁-C₆ alkyl. In some embodiments, R¹ is optionally substituted, linear or branched hexyl. In some embodiments, R¹ is optionally substituted, linear or branched pentyl. In some embodiments, R¹ is optionally substituted, linear or branched butyl. In some embodiments, R¹ is optionally substituted, linear or branched propyl. In some embodiments, R¹ is optionally substituted ethyl. In some embodiments, R¹ is optionally substituted methyl.

[0423] In some embodiments, R¹ is optionally substituted phenyl. In some embodiments, R¹ is substituted phenyl. In some embodiments, R¹ is phenyl.

[0424] In some embodiments, R¹ is optionally substituted carbocyclyl. In some embodiments, R¹ is optionally substituted C₃-C₁₀ carbocyclyl. In some embodiments, R¹ is optionally substituted monocyclic carbocyclyl. In some embodiments, R¹ is optionally substituted cycloheptyl. In some embodiments, R¹ is optionally substituted cyclohexyl. In some embodiments, R¹ is optionally substituted cyclopentyl. In some embodiments, R¹ is optionally substituted cyclobutyl. In some embodiments, R¹ is an optionally substituted cyclopropyl. In some embodiments, R¹ is optionally substituted bicyclic carbocyclyl.

[0425] In some embodiments, R¹ is an optionally substituted C₁-C₅₀ polycyclic hydrocarbon. In some embodiments, R¹ is an optionally substituted C₁-C₅₀ polycyclic hydrocarbon wherein one or more methylene units are optionally and independently replaced by an optionally substituted C₁-C₆ alkylene, C₁-C₆ alkenylene, —C≡C—, —C(R′)₂—, —Cy-, —O—, —S—, —S—S—, —N(R′)—, —C(O)—, —C(S)—, —C(NR′)—, —C(O)N(R′)—, —N(R′)C(O)N(R′)—, —N(R′)C(O)—, —N(R′)C(O)O—, —OC(O)N(R′)—, —S(O)—, —S(O)₂—, —S(O)₂N(R′)—, —N(R′)S(O)₂—, —SC(O)—, —C(O)S—, —OC(O)—, or —C(O)O—, wherein each variable is independently as defined above and described herein. In some embodiments, R¹ is optionally substituted

[chemical structure]

In some embodiments, R¹ is

[chemical structure]

In some embodiments, R¹ is optionally substituted

[chemical structure]

[0426] In some embodiments, R¹ is an optionally substituted C₁-C₅₀ aliphatic comprising one or more optionally substituted polycyclic hydrocarbon moieties. In some embodiments, R¹ is an optionally substituted C₁-C₅₀ aliphatic comprising one or more optionally substituted polycyclic hydrocarbon moieties, wherein one or more methylene units are optionally and independently replaced by an optionally substituted C₁-C₆ alkylene, C₁-C₆ alkenylene, —C≡C—, —C(R′)₂—, —Cy-, —O—, —S—, —S—S—, —N(R′)—, —C(O)—, —C(S)—, —C(NR′)—, —C(O)N(R′)—, —N(R′)C(O)N(R′)—, —N(R′)C(O)—, —N(R′)C(O)O—, —OC(O)N(R′)—, —S(O)—, —S(O)₂—, —S(O)₂N(R′)—, —N(R′)S(O)₂—, —SC(O)—, —C(O)S—, —OC(O)—, or —C(O)O—, wherein each variable is independently as defined above and described herein. In some embodiments, R′ is an optionally substituted C₁-C₅₀ aliphatic comprising one or more optionally substituted

[chemical structure]

In some embodiments, R¹ is

[chemical structure]

In some embodiments, R¹ is

[chemical structure]

In some embodiments, R¹ is

[chemical structure]

In some embodiments, R¹ is

[chemical structure]

In some embodiments, R¹ is

[chemical structure]

[0427] In some embodiments, R¹ is an optionally substituted aryl. In some embodiments, R¹ is an optionally substituted bicyclic aryl ring.

[0428] In some embodiments, R¹ is an optionally substituted heteroaryl. In some embodiments, R¹ is an optionally substituted 5-6 membered monocyclic heteroaryl ring having 1-3 heteroatoms independently selected from nitrogen, sulfur, or oxygen. In some embodiments, R¹ is a substituted 5-6 membered monocyclic heteroaryl ring having 1-3 heteroatoms independently selected from nitrogen, oxygen, or sulfur. In some embodiments, R¹ is an unsubstituted 5-6 membered monocyclic heteroaryl ring having 1-3 heteroatoms independently selected from nitrogen, sulfur, or oxygen.

[0429] In some embodiments, R¹ is an optionally substituted 5 membered monocyclic heteroaryl ring having 1-3 heteroatoms independently selected from nitrogen, oxygen or sulfur. In some embodiments, R¹ is an optionally substituted 6 membered monocyclic heteroaryl ring having 1-3 heteroatoms independently selected from nitrogen, oxygen, or sulfur.

[0430] In some embodiments, R¹ is an optionally substituted 5-membered monocyclic heteroaryl ring having 1 heteroatom selected from nitrogen, oxygen, or sulfur. In some embodiments, R¹ is selected from pyrrolyl, furanyl, or thienyl.

[0431] In some embodiments, R¹ is an optionally substituted 5-membered heteroaryl ring having 2 heteroatoms independently selected from nitrogen, oxygen, or sulfur. In certain embodiments, R¹ is an optionally substituted 5-membered heteroaryl ring having 1 nitrogen atom, and an additional heteroatom selected from sulfur or oxygen. Exemplary R¹ groups include optionally substituted pyrazolyl, imidazolyl, thiazolyl, isothiazolyl, oxazolyl or isoxazolyl.

[0432] In some embodiments, R¹ is a 6-membered heteroaryl ring having 1-3 nitrogen atoms. In other embodiments, R¹ is an optionally substituted 6-membered heteroaryl ring having 1-2 nitrogen atoms. In some embodiments, R¹ is an optionally substituted 6-membered heteroaryl ring having 2 nitrogen atoms. In certain embodiments, R¹ is an optionally substituted 6-membered heteroaryl ring having 1 nitrogen. Exemplary R¹ groups include optionally substituted pyridinyl, pyrimidinyl, pyrazinyl, pyridazinyl, triazinyl, or tetrazinyl.

[0433] In certain embodiments, R¹ is an optionally substituted 8-10 membered bicyclic heteroaryl ring having 1-4 heteroatoms independently selected from nitrogen, oxygen, or sulfur. In some embodiments, R¹ is an optionally substituted 5,6-fused heteroaryl ring having 1-4 heteroatoms independently selected from nitrogen, oxygen, or sulfur. In other embodiments, R¹ is an optionally substituted 5,6-fused heteroaryl ring having 1-2 heteroatoms independently selected from nitrogen, oxygen, or sulfur. In certain embodiments, R¹ is an optionally substituted 5,6-fused heteroaryl ring having 1 heteroatom independently selected from nitrogen, oxygen, or sulfur. In some embodiments, R¹ is an optionally substituted indolyl. In some embodiments, R¹ is an optionally substituted azabicyclo[3.2.1]octanyl. In certain embodiments, R¹ is an optionally substituted 5,6-fused heteroaryl ring having 2 heteroatoms independently selected from nitrogen, oxygen, or sulfur. In some embodiments, R¹ is an optionally substituted azaindolyl. In some embodiments, R¹ is an optionally substituted benzimidazolyl. In some embodiments, R¹ is an optionally substituted benzothiazolyl. In some embodiments, R¹ is an optionally substituted benzoxazolyl. In some embodiments, R¹ is an optionally substituted indazolyl. In certain embodiments, R¹ is an optionally substituted 5,6-fused heteroaryl ring having 3 heteroatoms independently selected from nitrogen, oxygen, or sulfur.

[0434] In certain embodiments, R¹ is an optionally substituted 6,6-fused heteroaryl ring having 1-4 heteroatoms independently selected from nitrogen, oxygen, or sulfur. In some embodiments, R¹ is an optionally substituted 6,6-fused heteroaryl ring having 1-2 heteroatoms independently selected from nitrogen, oxygen, or sulfur. In other embodiments, R¹ is an optionally substituted 6,6-fused heteroaryl ring having 1 heteroatom independently selected from nitrogen, oxygen, or sulfur. In some embodiments, R¹ is an optionally substituted quinolinyl. In some embodiments, R¹ is an optionally substituted isoquinolinyl. According to one aspect, R¹ is an optionally substituted 6,6-fused heteroaryl ring having 2 heteroatoms independently selected from nitrogen, oxygen, or sulfur. In some embodiments, R¹ is a quinazoline or a quinoxaline.

[0435] In some embodiments, R¹ is an optionally substituted heterocyclyl. In some embodiments, R¹ is an optionally substituted 3-7 membered saturated or partially unsaturated heterocyclic ring having 1-2 heteroatoms independently selected from nitrogen, oxygen, or sulfur. In some embodiments, R¹ is a substituted 3-7 membered saturated or partially unsaturated heterocyclic ring having 1-2 heteroatoms independently selected from nitrogen, oxygen, or sulfur. In some embodiments, R¹ is an unsubstituted 3-7 membered saturated or partially unsaturated heterocyclic ring having 1-2 heteroatoms independently selected from nitrogen, oxygen, or sulfur.

[0436] In some embodiments, R¹ is an optionally substituted heterocyclyl. In some embodiments, R¹ is an optionally substituted 6 membered saturated or partially unsaturated heterocyclic ring having 1-2 heteroatoms independently selected from nitrogen, oxygen, or sulfur. In some embodiments, R¹ is an optionally substituted 6 membered partially unsaturated heterocyclic ring having 2 heteroatoms independently selected from nitrogen, oxygen, or sulfur. In some embodiments, R¹ is an optionally substituted 6 membered partially unsaturated heterocyclic ring having 2 oxygen atoms.

[0437] In certain embodiments, R¹ is a 3-7 membered saturated or partially unsaturated heterocyclic ring having 1-2 heteroatoms independently selected from nitrogen, oxygen, or sulfur. In certain embodiments, R¹ is oxiranyl, oxetanyl, tetrahydrofuranyl, tetrahydropyranyl, oxepaneyl, aziridineyl, azetidineyl, pyrrolidinyl, piperidinyl, azepanyl, thiiranyl, thietanyl, tetrahydrothiophenyl, tetrahydrothiopyranyl, thiepanyl, dioxolanyl, oxathiolanyl, oxazolidinyl, imidazolidinyl, thiazolidinyl, dithiolanyl, dioxanyl, morpholinyl, oxathianyl, piperazinyl, thiomorpholinyl, dithianyl, dioxepanyl, oxazepanyl, oxathiepanyl, dithiepanyl, diazepanyl, dihydrofuranonyl, tetrahydropyranonyl, oxepanonyl, pyrolidinonyl, piperidinonyl, azepanonyl, dihydrothiophenonyl, tetrahydrothiopyranonyl, thiepanonyl, oxazolidinonyl, oxazinanonyl, oxazepanonyl, dioxolanonyl, dioxanonyl, dioxepanonyl, oxathiolinonyl, oxathianonyl, oxathiepanonyl, thiazolidinonyl, thiazinanonyl, thiazepanonyl, imidazolidinonyl, tetrahydropyrimidinonyl, diazepanonyl, imidazolidinedionyl, oxazolidinedionyl, thiazolidinedionyl, dioxolanedionyl, oxathiolanedionyl, piperazinedionyl, morpholinedionyl, thiomorpholinedionyl, tetrahydropyranyl, tetrahydrofuranyl, morpholinyl, thiomorpholinyl, piperidinyl, piperazinyl, pyrrolidinyl, tetrahydrothiophenyl, or tetrahydrothiopyranyl. In some embodiments, R¹ is an optionally substituted 5 membered saturated or partially unsaturated heterocyclic ring having 1-2 heteroatoms independently selected from nitrogen, oxygen, or sulfur.

[0438] In certain embodiments, R¹ is an optionally substituted 5-6 membered partially unsaturated monocyclic ring having 1-2 heteroatoms independently selected from nitrogen, oxygen, or sulfur. In certain embodiments, R¹ is an optionally substituted tetrahydropyridinyl, dihydrothiazolyl, dihydrooxazolyl, or oxazolinyl group.

[0439] In some embodiments, R¹ is an optionally substituted 8-10 membered bicyclic saturated or partially unsaturated heterocyclic ring having 1-4 heteroatoms independently selected from nitrogen, oxygen, or sulfur. In some embodiments, R¹ is an optionally substituted indolinyl. In some embodiments, R¹ is an optionally substituted isoindolinyl. In some embodiments, R¹ is an optionally substituted 1, 2, 3, 4-tetrahydroquinoline. In some embodiments, R¹ is an optionally substituted 1, 2, 3, 4-tetrahydroisoquinoline.

[0440] In some embodiments, R¹ is an optionally substituted C₁-C₁₀ aliphatic wherein one or more methylene units are optionally and independently replaced by an optionally substituted C₁-C₆ alkylene, C₁-C₆ alkenylene, —C≡C—, —C(R′)₂—, —Cy-, —O—, —S—, —S—S—, —N(R′)—, —C(O)—, —C(S)—, —C(NR′)—, —C(O)N(R′)—, —N(R′)C(O)N(R′)—, —N(R′)C(O)—, —N(R′)C(O)O—, —OC(O)N(R′)—, —S(O)—, —S(O)₂—, —S(O)₂N(R′)—, —N(R′)S(O)₂—, —SC(O)—, —C(O)S—, —OC(O)—, or —C(O)O—, wherein each variable is independently as defined above and described herein. In some embodiments, R′ is an optionally substituted C₁-C₁₀ aliphatic wherein one or more methylene units are optionally and independently replaced by an optionally-Cy-, —O—, —S—, —S—S—, —N(R′)—, —C(O)—, —C(S)—, —C(NR′)—, —C(O)N(R′)—, —N(R′)C(O)N(R′)—, —N(R′)C(O)—, —N(R′)C(O)O—, —OC(O)N(R′)—, —S(O)—, —S(O)₂—, —S(O)₂N(R′)—, —N(R′)S(O)₂—, —OC(O)—, or —C(O)O—, wherein each R′ is independently as defined above and described herein. In some embodiments, R¹ is an optionally substituted C₁-C₁₀ aliphatic wherein one or more methylene units are optionally and independently replaced by an optionally-Cy-, —O—, —S—, —S—S—, —N(R′)—, —C(O)—, —OC(O)—, or —C(O)O—, wherein each R′ is independently as defined above and described herein.

[0441] In some embodiments, R¹ is

[chemical structure]

[chemical structure]

[chemical structure]

[chemical structure]

[0442] In some embodiments, R¹ is CH₃—,

[chemical structure]

[0443] In some embodiments, R¹ comprises a terminal optionally substituted —(CH₂)₂-moiety which is connected to L. Exemplary such R¹ groups are depicted below:

[chemical structure]

[0444] In some embodiments, R¹ comprises a terminal optionally substituted —(CH₂)-moiety which is connected to L. Exemplary such R¹ groups are depicted below:

[chemical structure]

[0445] In some embodiments, R¹ is —S—R^{L2}, wherein R^{L2} is an optionally substituted C₁-C₉ aliphatic wherein one or more methylene units are optionally and independently replaced by an optionally substituted C₁-C₆ alkylene, C₁-C₆ alkenylene, —C≡C—, —C(R′)₂—, —Cy-, —O—, —S—, —S—S—, —N(R′)—, —C(O)—, —C(S)—, —C(NR′)—, —C(O)N(R′)—, —N(R′)C(O)N(R′)—, —N(R′)C(O)—, —N(R′)C(O)O—, —OC(O)N(R′)—, —S(O)—, —S(O)₂—, —S(O)₂N(R′)—, —N(R′)S(O)₂—, —SC(O)—, —C(O)S—, —OC(O)—, or —C(O)O—, and each of R¹ and -Cy- is independently as defined above and described herein. In some embodiments, R¹ is —S—R^{L2}, wherein the sulfur atom is connected with the sulfur atom in L group.

[0446] In some embodiments, R′ is —C(O)—R^{L}, wherein R^{L} is an optionally substituted C₁-C₉ aliphatic wherein one or more methylene units are optionally and independently replaced by an optionally substituted C₁-C₆ alkylene, C₁-C₆ alkenylene, —C≡C—, —C(R′)₂—, —Cy-, —O—, —S—, —S—S—, —N(R′)—, —C(O)—, —C(S)—, —C(NR′)—, —C(O)N(R′)—, —N(R′)C(O)N(R′)—, —N(R′)C(O)—, —N(R′)C(O)O—, —OC(O)N(R′)—, —S(O)—, —S(O)₂—, —S(O)₂N(R′)—, —N(R′)S(O)₂—, —SC(O)—, —C(O)S—, —OC(O)—, or —C(O)O—, and each of R′ and -Cy- is independently as defined above and described herein. In some embodiments, R¹ is —C(O)—R^{L2}, wherein the carbonyl group is connected with G in L group. In some embodiments, R¹ is —C(O)—R^{L2}, wherein the carbonyl group is connected with the sulfur atom in L group.

[0447] In some embodiments, R^{L2} is optionally substituted C₁-C₉ aliphatic. In some embodiments, R^{L2} is optionally substituted C₁-C₉ alkyl. In some embodiments, R^{L2} is optionally substituted C₁-C₉ alkenyl. In some embodiments, R^{L2} is optionally substituted C₁-C₉ alkynyl. In some embodiments, R^{L2} is an optionally substituted C₁-C₉ aliphatic wherein one or more methylene units are optionally and independently replaced by -Cy- or —C(O)—. In some embodiments, R^{L2} is an optionally substituted C₁-C₉ aliphatic wherein one or more methylene units are optionally and independently replaced by -Cy-. In some embodiments, R^{L2} is an optionally substituted C₁-C₉ aliphatic wherein one or more methylene units are optionally and independently replaced by an optionally substituted heterocycylene. In some embodiments, R^{L2} is an optionally substituted C₁-C₉ aliphatic wherein one or more methylene units are optionally and independently replaced by an optionally substituted arylene. In some embodiments, R^{L2} is an optionally substituted C₁-C₉ aliphatic wherein one or more methylene units are optionally and independently replaced by an optionally substituted heteroarylene. In some embodiments, R^{L2} is an optionally substituted C₁-C₉ aliphatic wherein one or more methylene units are optionally and independently replaced by an optionally substituted C₃-C₁₀ carbocyclylene. In some embodiments, R^{L2} is an optionally substituted C₁-C₉ aliphatic wherein two methylene units are optionally and independently replaced by -Cy- or —C(O)—. In some embodiments, R^{L2} is an optionally substituted C₁-C₉ aliphatic wherein two methylene units are optionally and independently replaced by -Cy- or —C(O)—. Exemplary R^{L2} groups are depicted below:

[chemical structure]

[0448] In some embodiments, R¹ is hydrogen, or an optionally substituted group selected from

[chemical structure]

—S—(C₁-C₁₀ aliphatic), C₁-C₁₀ aliphatic, aryl, C₁-C₆ heteroalkyl, heteroaryl and heterocyclyl. In some embodiments, R¹ is

[chemical structure]

or —S—(C₁-C₁₀ aliphatic). In some embodiments, R¹ is

[chemical structure]

[0449] In some embodiments, R¹ is an optionally substituted group selected from —S—(C₁-C₆ aliphatic), C₁-C₁₀ aliphatic, C₁-C₆ heteroaliphatic, aryl, heterocycyl and heteroaryl.

[0450] In some embodiments, R¹ is

[chemical structure]

[0451] In some embodiments, the sulfur atom in the R¹ embodiments described above and herein is connected with the sulfur atom, G, E, or —C(O)— moiety in the L embodiments described above and herein. In some embodiments, the —C(O)— moiety in the R¹ embodiments described above and herein is connected with the sulfur atom, G, E, or —C(O)— moiety in the L embodiments described above and herein.

[0452] In some embodiments, -L-R¹ is any combination of the L embodiments and R¹ embodiments described above and herein.

[0453] In some embodiments, -L-R¹ is -L³-G-R¹ wherein each variable is independently as defined above and described herein.

[0454] In some embodiments, -L-R¹ is -L⁴-G-R¹ wherein each variable is independently as defined above and described herein.

[0455] In some embodiments, -L-R¹ is -L³-G-S—R^{L2}, wherein each variable is independently as defined above and described herein.

[0456] In some embodiments, -L-R¹ is -L³-G-C(O)—R^{L2}, wherein each variable is independently as defined above and described herein.

[0457] In some embodiments, -L-R¹ is

[chemical structure]

wherein R^{L2} is an optionally substituted C₁-C₉ aliphatic wherein one or more methylene units are optionally and independently replaced by an optionally substituted C₁-C₆ alkylene, C₁-C₆ alkenylene, —C≡C—, —C(R′)₂—, —Cy-, —O—, —S—, —S—S—, —N(R′)—, —C(O)—, —C(S)—, —C(NR′)—, —C(O)N(R′)—, —N(R′)C(O)N(R′)—, —N(R′)C(O)—, —N(R′)C(O)O—, —OC(O)N(R′)—, —S(O)—, —S(O)₂—, —S(O)₂N(R′)—, —N(R′)S(O)₂—, —SC(O)—, —C(O)S—, —OC(O)—, or —C(O)O—, and each G is independently as defined above and described herein.

[0458] In some embodiments, -L-R¹ is —R^{L3}—S—S—R^{L2}, wherein each variable is independently as defined above and described herein. In some embodiments, -L-R¹ is —R^{L3}—C(O)—S—S—R^{L2}, wherein each variable is independently as defined above and described herein.

[0459] In some embodiments, -L-R¹ has the structure of:

[chemical structure]

wherein each variable is independently as defined above and described herein.

[0460] In some embodiments, -L-R¹ has the structure of:

[chemical structure]

wherein each variable is independently as defined above and described herein.

[0461] In some embodiments, -L-R¹ has the structure of:

[chemical structure]

wherein each variable is independently as defined above and described herein.

[0462] In some embodiments, -L-R¹ has the structure of:

[chemical structure]

wherein each variable is independently as defined above and described herein.

[0463] In some embodiments, -L-R¹ has the structure of:

[chemical structure]

wherein each variable is independently as defined above and described herein.

[0464] In some embodiments, -L-R¹ has the structure of:

[chemical structure]

wherein each variable is independently as defined above and described herein.

[0465] In some embodiments, -L-R¹ has the structure of:

[chemical structure]

wherein each variable is independently as defined above and described herein.

[0466] In some embodiments, -L-R¹ has the structure of:

[chemical structure]

wherein each variable is independently as defined above and described herein.

[0467] In some embodiments, -L-R¹ has the structure of:

[chemical structure]

wherein each variable is independently as defined above and described herein.

[0468] In some embodiments, -L-R¹ has the structure of:

[chemical structure]

wherein each variable is independently as defined above and described herein.

[0469] In some embodiments, -L-R¹ has the structure of:

[chemical structure]

wherein each variable is independently as defined above and described herein.

[0470] In some embodiments, -L-R¹ has the structure of:

[chemical structure]

wherein each variable is independently as defined above and described herein.

[0471] In some embodiments, -L-R¹ has the structure of:

[chemical structure]

wherein each variable is independently as defined above and described herein.

[0472] In some embodiments, -L-R¹ has the structure of:

[chemical structure]

wherein each variable is independently as defined above and described herein.

[0473] In some embodiments, -L-R¹ has the structure of:

[chemical structure]

wherein each variable is independently as defined above and described herein.

[0474] In some embodiments, -L-R¹ has the structure of:

[chemical structure]

wherein each variable is independently as defined above and described herein.

[0475] In some embodiments, -L-R¹ has the structure of:

[chemical structure]

wherein each variable is independently as defined above and described herein.

[0476] In some embodiments, -L-R¹ has the structure of:

[chemical structure]

wherein each variable is independently as defined above and described herein.

[0477] In some embodiments, -L-R¹ has the structure of:

[chemical structure]

wherein each variable is independently as defined above and described herein.

[0478] In some embodiments, -L-R¹ has the structure of:

[chemical structure]

wherein each variable is independently as defined above and described herein.

[0479] In some embodiments -L-R′ has the structure of:

[chemical structure]

wherein each variable is independently as defined above and described herein.

[0480] In some embodiments, L has the structure of:

[chemical structure]

wherein each variable is independently as defined above and described herein.

[0481] In some embodiments, —X-L-R¹ has the structure of:

[chemical structure]

wherein:
[0482] the phenyl ring is optionally substituted, and
[0483] each of R′ and X is independently as defined above and described herein.

[0484] In some embodiments, -L-R¹ is

[chemical structure]

[chemical structure]

[chemical structure]

[chemical structure]

[0485] In some embodiments -L-R¹ is:

[chemical structure]

[0486] In some embodiments, -L-R¹ CH₃—,

[chemical structure]

In some embodiments, -L-R¹ is

[chemical structure]

[0487] In some embodiments, -L-R¹ comprises a terminal optionally substituted —(CH₂)₂-moiety which is connected to X. In some embodiments, -L-R¹ comprises a terminal—(CH₂)₂-moiety which is connected to X. Exemplary such -L-R¹ moieties are depicted below:

[chemical structure]

[0488] In some embodiments, -L-R¹ comprises a terminal optionally substituted —(CH₂)-moiety which is connected to X. In some embodiments, -L-R¹ comprises a terminal —(CH₂)-moiety which is connected to X. Exemplary such -L-R¹ moieties are depicted below:

[chemical structure]

[0489] In some embodiments, -L-R¹ is

[chemical structure]

[0490] In some embodiments, -L-R¹ is CH₃—,

[chemical structure]

### and X is —S—.

[0491] In some embodiments, -L-R¹ is CH₃—,

[chemical structure]

### X is —S—, W is O, Y is —O—, and Z is —O—.

[0492] In some embodiments, R¹ is

[chemical structure]

or —S—(C₁-C₁₀ aliphatic).

[0493] In some embodiments, R¹ is

[chemical structure]

[0494] In some embodiments, X is —O— or —S—, and R¹ is

[chemical structure]

or —S—(C₁-C₁₀ aliphatic).

[0495] In some embodiments, X is —O— or —S—, and R¹ is

[chemical structure]

—S—(C₁-C₁₀ aliphatic) or —S—(C₁-C₅₀ aliphatic).

[0496] In some embodiments, L is a covalent bond and -L-R¹ is R¹.

[0497] In some embodiments, -L-R¹ is not hydrogen.

[0498] In some embodiments, —X-L-R¹ is R¹ is

[chemical structure]

—S—(C₁-C₁₀ aliphatic) or —S—(C₁-C₅₀ aliphatic).

[0499] In some embodiments, —X-L-R¹ has the structure of

[chemical structure]

wherein the

[chemical structure]

moiety is optionally substituted. In some embodiments, —X-L-R¹ is

[chemical structure]

[0500] In some embodiments, —X-L-R¹ is

[chemical structure]

In some embodiments, —X-L-R¹ is

[chemical structure]

In some embodiments, —X-L-R¹ has the structure of

[chemical structure]

wherein X′ is O or S, Y′ is —O—, —S— or —NR′—, and the

[chemical structure]

moiety is optionally substituted. In some embodiments, Y′ is —O—, —S— or —NH—. In some embodiments,

[chemical structure]

In some embodiments,

[chemical structure]

In some embodiments,

[chemical structure]

In some embodiments, —X-L-R¹ has the structure of

[chemical structure]

wherein X′ is O or S, and the

[chemical structure]

moiety is optionally substituted. In some embodiments,

[chemical structure]

In some embodiments, —X-L-R¹ is

[chemical structure]

wherein the

[chemical structure]

is optionally substituted. In some embodiments, —X-L-R¹ is

[chemical structure]

wherein the

[chemical structure]

is substituted. In some embodiments, —X-L-R¹ is

[chemical structure]

wherein the

[chemical structure]

is unsubstituted.

[0501] In some embodiments, —X-L-R¹ is R¹—C(O)S-L^{x}-S—, wherein L^{x} is an optionally substituted group selected from

[chemical structure]

In some embodiments, L^{x} is

[chemical structure]

In some embodiments, —X-L-R¹ is (CH₃)₃C—S—S-L^{x}-S—. In some embodiments, —X-L-R¹ is R¹—C(═X′)—Y′—C(R)₂—S-L^{x}-S—. In some embodiments, —X-L-R¹ is R—(═X′)—Y′—CH₂—S-L^{x}-S—. In some embodiments, —X-L-R¹ is

[chemical structure]

[0502] As will be appreciated by a person skilled in the art, many of the —X-L-R¹ groups described herein are cleavable and can be converted to —X— after administration to a subject. In some embodiments, —X-L-R¹ is cleavable. In some embodiments, —X-L-R¹ is —S-L-R¹, and is converted to —S— after administration to a subject. In some embodiments, the conversion is promoted by an enzyme of a subject. As appreciated by a person skilled in the art, methods of determining whether the —S-L-R′ group is converted to —S— after administration is widely known and practiced in the art, including those used for studying drug metabolism and pharmacokinetics.

[0503] In some embodiments, the internucleotidic linkage having the structure of formula I is

[chemical structure]

[0504] In some embodiments, the internucleotidic linkage of formula I has the structure of formula I-a:

[chemical structure]

wherein each variable is independently as defined above and described herein.

[0505] In some embodiments, the internucleotidic linkage of formula I has the structure of formula I-b:

[chemical structure]

wherein each variable is independently as defined above and described herein.

[0506] In some embodiments, the internucleotidic linkage of formula I is an phosphorothioate triester linkage having the structure of formula I-c:

[chemical structure]

wherein:
[0507] P* is an asymmetric phosphorus atom and is either Rp or Sp;
[0508] L is a covalent bond or an optionally substituted, linear or branched C₁-C₁₀ alkylene, wherein one or more methylene units of L are optionally and independently replaced by an optionally substituted C₁-C₆ alkylene, C₁-C₆ alkenylene, —C≡C—, —C(R′)₂—, —Cy-, —O—, —S—, —S—S—, —N(R′)—, —C(O)—, —C(S)—, —C(NR′)—, —C(O)N(R′)—, —N(R′)C(O)N(R′)—, —N(R′)C(O)—, —N(R′)C(O)O—, —OC(O)N(R′)—, —S(O)—, —S(O)₂—, —S(O)₂N(R′)—, —N(R′)S(O)₂—, —SC(O)—, —C(O)S—, —OC(O)—, or —C(O)O—;
[0509] R¹ is halogen, R, or an optionally substituted C₁-C₅₀ aliphatic wherein one or more methylene units are optionally and independently replaced by an optionally substituted C—C₆ alkylene, C₁-C₆ alkenylene, —C≡C—, —C(R′)₂—, —Cy-, —O—, —S—, —S—S—, —N(R′)—, —C(O)—, —C(S)—, —C(NR′)—, —C(O)N(R′)—, —N(R′)C(O)N(R′)—, —N(R′)C(O)—, —N(R′)C(O)O—, —OC(O)N(R′)—, —S(O)—, —S(O)₂—, —S(O)₂N(R′)—, —N(R′)S(O)₂—, —SC(O)—, —C(O)S—, —OC(O)—, or —C(O)O—;
[0510] each R′ is independently —R, —C(O)R, —CO₂R, or —SO₂R, or
   [0511] two R′ on the same nitrogen are taken together with their intervening atoms to form an optionally substituted heterocyclic or heteroaryl ring, or
   [0512] two R′ on the same carbon are taken together with their intervening atoms to form an optionally substituted aryl, carbocyclic, heterocyclic, or heteroaryl ring;
[0513] -Cy- is an optionally substituted bivalent ring selected from phenylene, carbocyclylene, arylene, heteroarylene, or heterocyclylene;
[0514] each R is independently hydrogen, or an optionally substituted group selected from C₁-C₆ aliphatic, phenyl, carbocyclyl, aryl, heteroaryl, or heterocyclyl;
[0515] each

[chemical structure]

independently represents a connection to a nucleoside; and
[0516] R¹ is not —H when L is a covalent bond.

[0517] In some embodiments, the internucleotidic linkage having the structure of formula I is

[chemical structure]

[chemical structure]

[0518] In some embodiments, the internucleotidic linkage having the structure of formula I-c is

[chemical structure]

[chemical structure]

[0519] In some embodiments, the present invention provides a chirally controlled oligonucleotide comprising one or more phosphate diester linkages, and one or more modified internucleotide linkages having the formula of I-a, I-b, or I-c.

[0520] In some embodiments, the present invention provides a chirally controlled oligonucleotide comprising at least one phosphate diester internucleotidic linkage and at least one phosphorothioate triester linkage having the structure of formula I-c. In some embodiments, the present invention provides a chirally controlled oligonucleotide comprising at least one phosphate diester internucleotidic linkage and at least two phosphorothioate triester linkages having the structure of formula I-c. In some embodiments, the present invention provides a chirally controlled oligonucleotide comprising at least one phosphate diester internucleotidic linkage and at least three phosphorothioate triester linkages having the structure of formula I-c. In some embodiments, the present invention provides a chirally controlled oligonucleotide comprising at least one phosphate diester internucleotidic linkage and at least four phosphorothioate triester linkages having the structure of formula I-c. In some embodiments, the present invention provides a chirally controlled oligonucleotide comprising at least one phosphate diester internucleotidic linkage and at least five phosphorothioate triester linkages having the structure of formula I-c.

[0521] In some embodiments, the present invention provides a chirally controlled oligonucleotide comprising a sequence found in any of the Appendixes of the application. In some embodiments, the present invention provides a chirally controlled oligonucleotide comprising a sequence found in Appendix A. In some embodiments, the present invention provides a chirally controlled oligonucleotide comprising a sequence found in Appendix B. In some embodiments, the present invention provides a chirally controlled oligonucleotide comprising a sequence found in Appendix C. In some embodiments, the present invention provides a chirally controlled oligonucleotide having a sequence found in any of the Appendixes of the application. In some embodiments, the present invention provides a chirally controlled oligonucleotide having a sequence found in Appendix A. In some embodiments, the present invention provides a chirally controlled oligonucleotide having a sequence found in Appendix B. In some embodiments, the present invention provides a chirally controlled oligonucleotide having a sequence found in Appendix C.

[0522] In some embodiments, the present invention provides a chirally controlled oligonucleotide comprising a sequence found in GCCTCAGTCTGCTTCGCACC (SEQ ID NO: 106). In some embodiments, the present invention provides a chirally controlled oligonucleotide comprising a sequence found in GCCTCAGTCTGCTTCGCACC (SEQ ID NO: 106), wherein the said sequence has over 50% identity with GCCTCAGTCTGCTTCGCACC (SEQ ID NO: 106). In some embodiments, the present invention provides a chirally controlled oligonucleotide comprising a sequence found in GCCTCAGTCTGCTTCGCACC (SEQ ID NO: 106), wherein the said sequence has over 60% identity with GCCTCAGTCTGCTTCGCACC (SEQ ID NO: 106). In some embodiments, the present invention provides a chirally controlled oligonucleotide comprising a sequence found in GCCTCAGTCTGCTTCGCACC (SEQ ID NO: 106), wherein the said sequence has over 70% identity with GCCTCAGTCTGCTTCGCACC (SEQ ID NO: 106). In some embodiments, the present invention provides a chirally controlled oligonucleotide comprising a sequence found in GCCTCAGTCTGCTTCGCACC (SEQ ID NO: 106), wherein the said sequence has over 80% identity with GCCTCAGTCTGCTTCGCACC (SEQ ID NO: 106). In some embodiments, the present invention provides a chirally controlled oligonucleotide comprising a sequence found in GCCTCAGTCTGCTTCGCACC (SEQ ID NO: 106), wherein the said sequence has over 90% identity with GCCTCAGTCTGCTTCGCACC (SEQ ID NO: 106). In some embodiments, the present invention provides a chirally controlled oligonucleotide comprising a sequence found in GCCTCAGTCTGCTTCGCACC (SEQ ID NO: 106), wherein the said sequence has over 95% identity with GCCTCAGTCTGCTTCGCACC (SEQ ID NO: 106). In some embodiments, the present invention provides a chirally controlled oligonucleotide comprising the sequence of GCCTCAGTCTGCTTCGCACC (SEQ ID NO: 106). In some embodiments, the present invention provides a chirally controlled oligonucleotide having the sequence of GCCTCAGTCTGCTTCGCACC (SEQ ID NO: 106).

[0523] In some embodiments, the present invention provides a chirally controlled oligonucleotide comprising a sequence found in GCCTCAGTCTGCTTCGCACC (SEQ ID NO: 106), wherein at least one internucleotidic linkage has a chiral linkage phosphorus. In some embodiments, the present invention provides a chirally controlled oligonucleotide comprising a sequence found in GCCTCAGTCTGCTTCGCACC (SEQ ID NO: 106), wherein at least one internucleotidic linkage has the structure of formula I. In some embodiments, the present invention provides a chirally controlled oligonucleotide comprising a sequence found in GCCTCAGTCTGCTTCGCACC (SEQ ID NO: 106), wherein each internucleotidic linkage has the structure of formula I. In some embodiments, the present invention provides a chirally controlled oligonucleotide comprising a sequence found in GCCTCAGTCTGCTTCGCACC (SEQ ID NO: 106), wherein at least one internucleotidic linkage has the structure of formula I-c. In some embodiments, the present invention provides a chirally controlled oligonucleotide comprising a sequence found in GCCTCAGTCTGCTTCGCACC (SEQ ID NO: 106), wherein each internucleotidic linkage has the structure of formula I-c. In some embodiments, the present invention provides a chirally controlled oligonucleotide comprising a sequence found in GCCTCAGTCTGCTTCGCACC (SEQ ID NO: 106), wherein at least one internucleotidic linkage is

[chemical structure]

In some embodiments, the present invention provides a chirally controlled oligonucleotide comprising a sequence found in GCCTCAGTCTGCTTCGCACC (SEQ ID NO: 106), wherein each internucleotidic linkage is

[chemical structure]

In some embodiments, the present invention provides a chirally controlled oligonucleotide comprising a sequence found in GCCTCAGTCTGCTTCGCACC (SEQ ID NO: 106), wherein at least one internucleotidic linkage is

[chemical structure]

In some embodiments, the present invention provides a chirally controlled oligonucleotide comprising a sequence found in GCCTCAGTCTGCTTCGCACC (SEQ ID NO: 106), wherein each internucleotidic linkage is

[chemical structure]

[0524] In some embodiments, the present invention provides a chirally controlled oligonucleotide comprising the sequence of GCCTCAGTCTGCTTCGCACC (SEQ ID NO: 106), wherein at least one internucleotidic linkage has a chiral linkage phosphorus. In some embodiments, the present invention provides a chirally controlled oligonucleotide comprising the sequence of GCCTCAGTCTGCTTCGCACC (SEQ ID NO: 106), wherein at least one internucleotidic linkage has the structure of formula I. In some embodiments, the present invention provides a chirally controlled oligonucleotide comprising the sequence of GCCTCAGTCTGCTTCGCACC (SEQ ID NO: 106), wherein each internucleotidic linkage has the structure of formula I. In some embodiments, the present invention provides a chirally controlled oligonucleotide comprising the sequence of GCCTCAGTCTGCTTCGCACC (SEQ ID NO: 106), wherein at least one internucleotidic linkage has the structure of formula I-c. In some embodiments, the present invention provides a chirally controlled oligonucleotide comprising the sequence of GCCTCAGTCTGCTTCGCACC (SEQ ID NO: 106), wherein each internucleotidic linkage has the structure of formula I-c. In some embodiments, the present invention provides a chirally controlled oligonucleotide comprising the sequence of GCCTCAGTCTGCTTCGCACC (SEQ ID NO: 106), wherein at least one internucleotidic linkage is

[chemical structure]

In some embodiments, the present invention provides a chirally controlled oligonucleotide comprising the sequence of GCCTCAGTCTGCTTCGCACC (SEQ ID NO: 106), wherein each internucleotidic linkage is

[chemical structure]

In some embodiments, the present invention provides a chirally controlled oligonucleotide comprising the sequence of GCCTCAGTCTGCTTCGCACC (SEQ ID NO: 106), wherein at least one internucleotidic linkage is

[chemical structure]

In some embodiments, the present invention provides a chirally controlled oligonucleotide comprising the sequence of GCCTCAGTCTGCTTCGCACC (SEQ ID NO: 106), wherein each internucleotidic linkage is

[chemical structure]

[0525] In some embodiments, the present invention provides a chirally controlled oligonucleotide having the sequence of GCCTCAGTCTGCTTCGCACC (SEQ ID NO: 106), wherein at least one internucleotidic linkage has a chiral linkage phosphorus. In some embodiments, the present invention provides a chirally controlled oligonucleotide having the sequence of GCCTCAGTCTGCTTCGCACC (SEQ ID NO: 106), wherein at least one internucleotidic linkage has the structure of formula I. In some embodiments, the present invention provides a chirally controlled oligonucleotide having the sequence of GCCTCAGTCTGCTTCGCACC (SEQ ID NO: 106), wherein each internucleotidic linkage has the structure of formula I. In some embodiments, the present invention provides a chirally controlled oligonucleotide having the sequence of GCCTCAGTCTGCTTCGCACC (SEQ ID NO: 106), wherein at least one internucleotidic linkage has the structure of formula I-c. In some embodiments, the present invention provides a chirally controlled oligonucleotide having the sequence of GCCTCAGTCTGCTTCGCACC (SEQ ID NO: 106), wherein each internucleotidic linkage has the structure of formula I-c. In some embodiments, the present invention provides a chirally controlled oligonucleotide having the sequence of GCCTCAGTCTGCTTCGCACC (SEQ ID NO: 106), wherein at least one internucleotidic linkage is

[chemical structure]

In some embodiments, the present invention provides a chirally controlled oligonucleotide having the sequence of GCCTCAGTCTGCTTCGCACC (SEQ ID NO: 106), wherein each internucleotidic linkage is

[chemical structure]

In some embodiments, the present invention provides a chirally controlled oligonucleotide having the sequence of GCCTCAGTCTGCTTCGCACC (SEQ ID NO: 106), wherein at least one internucleotidic linkage is

[chemical structure]

In some embodiments, the present invention provides a chirally controlled oligonucleotide having the sequence of GCCTCAGTCTGCTTCGCACC (SEQ ID NO: 106), wherein each internucleotidic linkage is

[chemical structure]

[0526] In some embodiments, the present invention provides a chirally controlled oligonucleotide having the sequence of GCCTCAGTCTGCTTCGCACC (SEQ ID NO: 106), wherein at least one linkage phosphorus is Rp. It is understood by a person of ordinary skill in the art that in certain embodiments wherein the chirally controlled oligonucleotide comprises an RNA sequence, each T is independently and optionally replaced with U. In some embodiments, the present invention provides a chirally controlled oligonucleotide having the sequence of GCCTCAGTCTGCTTCGCACC (SEQ ID NO: 106), wherein each linkage phosphorus is Rp. In some embodiments, the present invention provides a chirally controlled oligonucleotide having the sequence of GCCTCAGTCTGCTTCGCACC (SEQ ID NO: 106), wherein at least one linkage phosphorus is Sp. In some embodiments, the present invention provides a chirally controlled oligonucleotide having the sequence of GCCTCAGTCTGCTTCGCACC (SEQ ID NO: 106), wherein each linkage phosphorus is Sp. In some embodiments, the present invention provides a chirally controlled oligonucleotide having the sequence of GCCTCAGTCTGCTTCGCACC (SEQ ID NO: 106), wherein the oligonucleotide is a blockmer. In some embodiments, the present invention provides a chirally controlled oligonucleotide having the sequence of GCCTCAGTCTGCTTCGCACC (SEQ ID NO: 106), wherein the oligonucleotide is a stereoblockmer. In some embodiments, the present invention provides a chirally controlled oligonucleotide having the sequence of GCCTCAGTCTGCTTCGCACC (SEQ ID NO: 106), wherein the oligonucleotide is a P-modification blockmer. In some embodiments, the present invention provides a chirally controlled oligonucleotide having the sequence of GCCTCAGTCTGCTTCGCACC (SEQ ID NO: 106), wherein the oligonucleotide is a linkage blockmer. In some embodiments, the present invention provides a chirally controlled oligonucleotide having the sequence of GCCTCAGTCTGCTTCGCACC (SEQ ID NO: 106), wherein the oligonucleotide is an altmer. In some embodiments, the present invention provides a chirally controlled oligonucleotide having the sequence of GCCTCAGTCTGCTTCGCACC (SEQ ID NO: 106), wherein the oligonucleotide is a stereoaltmer. In some embodiments, the present invention provides a chirally controlled oligonucleotide having the sequence of GCCTCAGTCTGCTTCGCACC (SEQ ID NO: 106), wherein the oligonucleotide is a P-modification altmer. In some embodiments, the present invention provides a chirally controlled oligonucleotide having the sequence of GCCTCAGTCTGCTTCGCACC (SEQ ID NO: 106), wherein the oligonucleotide is a linkage altmer. In some embodiments, the present invention provides a chirally controlled oligonucleotide having the sequence of GCCTCAGTCTGCTTCGCACC (SEQ ID NO: 106), wherein the oligonucleotide is a unimer. In some embodiments, the present invention provides a chirally controlled oligonucleotide having the sequence of GCCTCAGTCTGCTTCGCACC (SEQ ID NO: 106), wherein the oligonucleotide is a stereounimer. In some embodiments, the present invention provides a chirally controlled oligonucleotide having the sequence of GCCTCAGTCTGCTTCGCACC (SEQ ID NO: 106), wherein the oligonucleotide is a P-modification unimer. In some embodiments, the present invention provides a chirally controlled oligonucleotide having the sequence of GCCTCAGTCTGCTTCGCACC (SEQ ID NO: 106), wherein the oligonucleotide is a linkage unimer. In some embodiments, the present invention provides a chirally controlled oligonucleotide having the sequence of GCCTCAGTCTGCTTCGCACC (SEQ ID NO: 106), wherein the oligonucleotide is a gapmer. In some embodiments, the present invention provides a chirally controlled oligonucleotide having the sequence of GCCTCAGTCTGCTTCGCACC (SEQ ID NO: 106), wherein the oligonucleotide is a skipmer.

[0527] In some embodiments, the present invention provides a chirally controlled oligonucleotide having the sequence of GCCTCAGTCTGCTTCGCACC (SEQ ID NO: 106), wherein each cytosine is optionally and independently replaced by 5-methylcytosine. In some embodiments, the present invention provides a chirally controlled oligonucleotide having the sequence of GCCTCAGTCTGCTTCGCACC (SEQ ID NO: 106), wherein at least one cytosine is optionally and independently replaced by 5-methylcytosine. In some embodiments, the present invention provides a chirally controlled oligonucleotide having the sequence of GCCTCAGTCTGCTTCGCACC (SEQ ID NO: 106), wherein each cytosine is optionally and independently replaced by 5-methylcytosine. Exemplary chirally controlled oligonucleotides having the sequence of GCCTCAGTCTGCTTCGCACC (SEQ ID NO: 106) are depicted in Table 2, below:

TABLE 2
Exemplary chirally controlled oligonucleotides.

| | SEQ | | |
|---|---|---|---|
| Oligo | ID NO: | Stereochemistry/Sequence | Description |
| 101 | 106 | All-(Rp)-d[GsCsCsTsCsAsGsTsCsTsGsCsTsTsCsGsCsAsCsC] | All-R |
| 102 | 106 | All-(Sp)-d[GsCsCsTsCsAsGsTsCsTsGsCsTsTsCsGsCsAsCsC] | All-S |
| 103 | 106 | (Rp, Rp, Rp, Rp, Rp, Sp, Sp, Sp, Sp, Sp Sp, Sp, Sp, Sp, Rp, Rp, Rp, Rp, | 5R-9S-5R |
| | | Rp)-d[GsCsCsTsCsAsGsTsCsTsGsCsTsTsCsGsCsAsCsC] | |
| 104 | 106 | (Sp, Sp, Sp, Sp, Sp, Rp, Rp, Rp, Rp, Rp Rp, Rp, Rp, Rp, Sp, Sp, Sp, Sp, | 5S-9R-5S |
| | | Sp)-d[GsCsCsTsCsAsGsTsCsTsGsCsTsTsCsGsCsAsCsC] | |
| 105 | 106 | (Sp, Rp, Rp, Rp, Rp, Rp, Rp, Rp, Rp, Rp Rp, Rp, Rp, Rp, Rp, Rp, Rp, | 1S-17R-1S |
| | | Rp, Sp)-d[GsCsCsTsCsAsGsTsCsTsGsCsTsTsCsGsCsAsCsC] | |
| 106 | 106 | (Rp, Sp, Sp, Sp, Sp, Sp, Sp, Sp, Sp, Sp Sp, Sp, Sp, Sp, Sp, Sp, Sp, Sp, | 1R-17S-1R |
| | | Rp)-d[GsCsCsTsCsAsGsTsCsTsGsCsTsTsCsGsCsAsCsC] | |
| 107 | 106 | (Rp, Sp, Rp, Sp, Rp, Sp, Rp, Sp, Rp, Sp Rp, Sp, Rp, Sp, Rp, Sp, Rp, Sp, | (R/S)₉R |
| | | Rp)-d[GsCsCsTsCsAsGsTsCsTsGsCsTsTsCsGsCsAsCsC] | |
| 108 | 106 | (Sp, Rp, Sp, Rp, Sp, Rp, Sp, Rp, Sp, Rp Sp, Rp, Sp, Rp, Sp, Rp, Sp, Rp, | (S/R)₉S |
| | | Sp)-d[GsCsCsTsCsAsGsTsCsTsGsCsTsTsCsGsCsAsCsC] | |
| 109 | 106 | (Sp, Sp, Sp, Rp, Rp, Rp, Rp, Rp, Rp, Rp Rp, Rp, Rp, Rp, Rp, Rp, Sp, Sp, | 3S-13R-3S |
| | | Sp)d[GsCsCsTsCsAsGsTsCsTsGsCsTsTsCsGsCsAsCsC] | |
| 110 | 106 | (Rp, Rp, Rp, Sp, Sp, Sp, Sp, Sp, Sp, Sp Sp, Sp, Sp, Sp, Sp, Sp, Rp, Rp, | 3R-13S-3R |
| | | Rp)-d[GsCsCsTsCsAsGsTsCsTsGsCsTsTsCsGsCsAsCsC] | |
| 111 | 106 | (Sp, Sp, Sp, Sp, Sp, Sp, Sp, Sp, Sp, Sp Sp, Sp, Sp, Sp, Sp, Sp, Sp, Sp, | 18S/R¹⁹ |
| | | Rp)-d[GsCsCsTsCsAsGsTsCsTsGsCsTsTsCsGsCsAsCsC] | |
| 112 | 106 | (Sp, Sp, Sp, Sp, Sp, Sp, Sp, Sp, Rp, Sp Sp, Sp, Sp, Sp, Sp, Sp, Sp, Sp, | 18S/R⁹ |
| | | Sp)-d[GsCsCsTsCsAsGsTsCsTsGsCsTsTsCsGsCsAsCsC] | |
| 113 | 106 | (Sp, Rp, Sp, Sp, Sp, Sp, Sp, Sp, Sp, Sp Sp, Sp, Sp, Sp, Sp, Sp, Sp, Sp, | 18S/R² |
| | | Sp)-d[GsCsCsTsCsAsGsTsCsTsGsCsTsTsCsGsCsAsCsC] | |
| 114 | 106 | (Rp, Rp, Sp, Rp, Rp, Sp, Rp, Rp, Sp, Rp Rp, Sp, Rp, Rp, Sp, Rp, Rp, Sp, | (RRS)₆-R |
| | | Rp)-d[GsCsCsTsCsAsGsTsCsTsGsCsTsTsCsGsCsAsCsC] | |
| 115 | 106 | (Sp, Rp, Rp, Sp, Rp, Rp, Sp, Rp, Rp, Sp, Rp Rp, Sp, Rp, Rp, Sp, Rp, Rp, | S-(RRS)₆ |
| | | Sp)-d[GsCsCsTsCsAsGsTsCsTsGsCsTsTsCsGsCsAsCsC] | |
| 116 | 106 | (Rp, Sp, Rp, Rp, Sp, Rp, Rp, Sp, Rp Rp, Sp, Rp, Rp, Sp, Rp, Rp, Sp, Rp | RS-(RRS)₅- |
| | | Rp)d[GsCsCsTsCsAsGsTsCsTsGsCsTsTsCsGsCsAsCsC] | RR |
| 122 | 106 | All-(Rp)-d[Gs1Cs1Cs1Ts1Cs1As1Gs1Ts1Cs1Ts1Gs1Cs1Ts1Ts1Cs1Gs1Cs1As1Cs1C] | All-R |
| 123 | 106 | (Sp, Rp, Rp, Rp, Rp, Rp, Rp, Rp, Rp, Rp Rp, Rp, Rp, Rp, Rp, Rp, Rp, | 1S-17R-1S |
| | | Rp, Sp)-d[Gs1Cs1Cs1Ts1Cs1As1Gs1Ts1Cs1Ts1Gs1Cs1Ts1Ts1Cs1Gs1Cs1As1Cs1C] | |
| 124 | 106 | All-(Sp)-d[Gs1Cs1Cs1Ts1Cs1As1Gs1Ts1Cs1Ts1Gs1Cs1Ts1Ts1Cs1Gs1Cs1As1Cs1C] | All-S |
| 125 | | All-(Rp)-d[5mCs1As1Ts1G] | All-R |
| 126 | | All-(Rp)-d[Cs2As2Gs2T] | All-R |
| 127 | | All-(Rp)-d[Cs3As3Gs3T] | All-R |
| 128 | | All-(Sp)-d[Cs4As4Gs4T] | All-S |
| 129 | | All-(Sp)-d[Cs5As5Gs5T] | All-S |
| 130 | | All-(Sp)-d[Cs6As6Gs6T] | All-S |
| 131 | 106 | All-(Rp)-d[Gs7Cs7Cs7Ts7Cs7As7Gs7Ts7Cs7Ts7Gs7 | All-R |
| | | Cs7Ts7Ts7Cs7Gs7Cs7As7Cs7C] | |
| 132 | 106 | All-(Sp)-d[Gs7Cs7Cs7Ts7Cs7As7Gs7Ts7Cs7Ts7Gs7 | All-S |
| | | Cs7Ts7Ts7Cs7Gs7Cs7As7Cs7C] | |
| 133 | 106 | (Rp, Rp, Rp, Rp, Rp, Sp, Sp, Sp, Sp, Sp Sp, Sp, Sp, Sp, Rp, Rp, Rp, Rp, | 5R-9S-5R |
| | | Rp)-d[Gs15mCs15mCs1Ts15mCs1As1Gs1Ts15mCs1Ts1 | |
| | | Gs15mCs1Ts1Ts15mCs1Gs15mCs1As15mCs15mC] | |
| 134 | 106 | (Sp, Sp, Sp, Sp, Sp, Rp, Rp, Rp, Rp, Rp Rp, Rp, Rp, Rp, Sp, Sp, Sp, Sp, | 5S-9R-5S |
| | | Sp)-d[Gs15mCs15mCs1Ts15mCs1As1Gs1Ts15mCs1Ts1 | |
| | | Gs15mCs1Ts1Ts15mCs1Gs15mCs1As15mCs15mC] | |
| 135 | 108 | All-(Rp)-d[5mCs1As1Gs1Ts15mCs1Ts1Gs15mCs1Ts1Ts15mCs1G] | All-R |
| 136 | 108 | All-(Sp)-d[5mCs1As1Gs1Ts15mCs1Ts1Gs15mCs1Ts1Ts15mCs1G] | All-S |
| 137 | 108 | (Sp, Rp, Rp, Rp, Rp, Rp, Rp, Rp, Rp, Rp, Sp)- | 1S-9R-1S |
| | | d[5mCs1As1Gs1Ts15mCs1Ts1Gs15mCs1Ts1Ts15mCs1G] | |
| 138 | 108 | (Sp, Sp, Rp, Rp, Rp, Rp, Rp, Rp, Rp, Sp, Sp)- | 2S-7R-2S |
| | | d[5mCs1As1Gs1Ts15mCs1Ts1Gs15mCs1Ts1Ts15mCs1G] | |
| 139 | 108 | (Rp, Sp, Sp, Sp, Sp, Sp, Sp, Sp, Sp, Sp, Rp)- | 1R-9S-1R |
| | | d[5mCs1As1Gs1Ts15mCs1Ts1Gs15mCs1Ts1Ts15mCs1G] | |
| 140 | 108 | (Rp, Rp, Sp, Sp, Sp, Sp, Sp, Sp, Sp, Rp, Rp)- | 2R-7S-2R |
| | | d[5mCs1As1Gs1Ts15mCs1Ts1Gs15mCs1Ts1Ts15mCs1G] | |
| 141 | 108 | (Sp, Sp, Sp, Rp, Rp, Rp, Rp, Rp, Sp, Sp, Sp)- | 3S-5R-3S |
| | | d[5mCs1As1Gs1Ts15mCs1Ts1Gs15mCs1Ts1Ts15mCs1G] | |
| 142 | 108 | (Rp, Rp, Rp, Sp, Sp, Sp, Sp, Sp, Rp, Rp, Rp)- | 3R-5S-3R |
| | | d[5mCs1As1Gs1Ts15mCs1Ts1Gs15mCs1Ts1Ts15mCs1G] | |
| 143 | 108 | (Sp, Sp, Rp, Sp, Sp, Rp, Sp, Sp, Rp, Sp, Sp)- | (SSR)₃-SS |
| | | d[5mCs1As1Gs1Ts15mCs1Ts1Gs15mCs1Ts1Ts15mCs1G] | |
| 144 | 108 | (Rp, Rp, Sp, Rp, Rp, Sp, Rp, Rp, Sp, Rp, Rp)- | (RRS)₃-RR |
| | | d[5mCs1As1Gs1Ts15mCs1Ts1Gs15mCs1Ts1Ts15mCs1G] | |
| 145 | 109 | All-(Rp)-d[5mCs1Ts15mCs1As1Gs1Ts15mCs1Ts1Gs15mCs1Ts1 | All-R |
| | | Ts15mCs1Gs15mC] | |
| 146 | | All-(Rp)-d[Gs15mCs1Ts1G] | All-R |
| 147 | | All-(Rp)-d[5mCs1As1Gs1T] | All-R |
| 148 | 108 | All-(Rp)-d[5mCs2As2Gs2Ts25mCs2Ts2Gs25mCs2Ts2Ts25mCs2G] | All-R |
| 149 | 108 | All-(Rp)-d[5mCs4As4Gs4Ts45mCs4Ts4Gs45mCs4Ts4Ts45mCs4G] | All-R |
| 150 | | All-(Rp)-d[TsCs1AsT] | All-R |
| 151 | | All-(Sp)-d[Cs1AsGs1T] | All-S |
| 152 | | All-(Sp)-d[Cs1AGs1T] | All-S |
| 153 | | All-(Sp)-d[CAs1GsT] | All-S |
| 154 | | All-(Rp)-d[Ts1Cs1As1T] | All-R |
| 155 | | All-(Rp)-d[Ts2Gs2As2C] | All-R |
| 156 | | All-(Sp)-d[Gs15mCs1Ts1G] | All-S |
| 157 | | All-(Sp)-d[5mCs1As1Gs1T] | All-S |
| 158 | 106 | (Sp, Sp, Sp, Sp, Sp, Rp, Rp, Rp, Rp, Rp Rp, Rp, Rp, Rp, Sp, Sp, Sp, Sp)- | 5S-9R-4S |
| | | d[GsCsCsTsCsAsGsTsCsTsGsCsTsTsCs1GsCsACsC] | |
| 159 | 106 | (Sp, Sp, Sp, Sp, Sp, Rp, Rp, Rp, Rp, Rp Rp, Rp, Rp, Rp, Sp, Sp, Sp, Sp, | 5S-9R-5S |
| | | Sp)-d[Gs1Cs1Cs1Ts1CsAsGsTsCsTsGsCsTsTsCs1GsCs2As2Cs2C] | |
| 160 | 106 | All-(Rp)- | All-R |
| | | (Gs5mCs5mCsTs5mCs)_{MOE}d[AsGsTs5mCsTsGs5mCsTsTs5mCs](Gs5mCsAs5mCs5mC)_{MOE} | |
| 161 | 106 | All-(Sp)- | All-S |
| | | (Gs5mCs5mCsTs5mCs)_{MOE}d[AsGsTs5mCsTsGs5mCsTsTs5mCs](Gs5mCsAs5mCs5mC)_{MOE} | |
| 162 | 106 | (Rp, Rp, Rp, Rp, Rp, Sp, Sp, Sp, Sp, Sp Sp, Sp, Sp, Sp, Rp, Rp, Rp, Rp, | 5R-9S-5R |
| | | Rp)-(Gs5mCs5mCsTs5mCs)_{MOE}d[AsGsTs5mCsTsGs5mCsTsTs5mCs](Gs5mCsAs5mCs5mC)_{MOE} | |
| 163 | 106 | (Sp, Sp, Sp, Sp, Sp, Rp, Rp, Rp, Rp, Rp Rp, Rp, Rp, Rp, Sp, Sp, Sp, Sp, | 5S-9R-5S |
| | | Sp)-(Gs5mCs5mCsTs5mCs)_{MOE}d[AsGsTs5mCsTsGs5mCsTsTs5mCs](Gs5mCsAs5mCs5mC)_{MOE} | |
| 164 | 106 | (Sp, Rp, Rp, Rp, Rp, Rp, Rp, Rp, Rp, Rp Rp, Rp, Rp, Rp, Rp, Rp, Rp, | 1S-17R-1S |
| | | Rp, Sp)-(Gs5mCs5mCsTs5mCs)_{MOE}d[AsGsTs5mCsTsGs5mCsTsTs5mCs] | |
| | | (Gs5mCsAs5mCs5mC)_{MOE} | |
| 165 | 106 | (Rp, Sp, Sp, Sp, Sp, Sp, Sp, Sp, Sp, Sp Sp, Sp, Sp, Sp, Sp, Sp, Sp, Sp, | 1R-17S-1R |
| | | Rp)-(Gs5mCs5mCsTs5mCs)_{MOE}d[AsGsTs5mCsTsGs5mCsTsTs5mCs] | |
| | | (Gs5mCsAs5mCs5mC)_{MOE} | |
| 166 | 106 | (Rp, Sp, Rp, Sp, Rp, Sp, Rp, Sp, Rp, Sp Rp, Sp, Rp, Sp, Rp, Sp, Rp, Sp, | (R/S)₉R |
| | | Rp)-(Gs5mCs5mCsTs5mCs)_{MOE}d[AsGsTs5mCsTsGs5mCsTsTs5mCs] | |
| | | (Gs5mCsAs5mCs5mC)_{MOE} | |
| 167 | 106 | (Sp, Rp, Sp, Rp, Sp, Rp, Sp, Rp, Sp, Rp Sp, Rp, Sp, Rp, Sp, Rp, Sp, Rp, | (S/R)₉S |
| | | Sp)-(Gs5mCs5mCsTs5mCs)_{MOE}d[AsGsTs5mCsTsGs5mCsTsTs5mCs] | |
| | | (Gs5mCsAs5mCs5mC)_{MOE} | |
| 168 | 106 | (Sp, Sp, Sp, Rp, Rp, Rp, Rp, Rp, Rp, Rp Rp, Rp, Rp, Rp, Rp, Rp, Sp, Sp, | 3S-13R-3S |
| | | Sp)(Gs5mCs5mCsTs5mCs)_{MOE}d[AsGsTs5mCsTsGs5mCsTsTs5mCs] | |
| | | (Gs5mCsAs5mCs5mC)_{MOE} | |
| 169 | 106 | (Rp, Rp, Rp, Sp, Sp, Sp, Sp, Sp, Sp, Sp Sp, Sp, Sp, Sp, Sp, Sp, Rp, Rp, | 3R-13S-3R |
| | | Rp)-(Gs5mCs5mCsTs5mCs)_{MOE}d[AsGsTs5mCsTsGs5mCsTsTs5mCs] | |
| | | (Gs5mCsAs5mCs5mC)_{MOE} | |
| 170 | 106 | (Sp, Sp, Sp, Sp, Sp, Sp, Sp, Sp, Sp, Sp Sp, Sp, Sp, Sp, Sp, Sp, Sp, Sp, | 18S/R¹⁹ |
| | | Rp)-(Gs5mCs5mCsTs5mCs)_{MOE}d[AsGsTs5mCsTsGs5mCsTsTs5mCs] | |
| | | (Gs5mCsAs5mCs5mC)_{MOE} | |
| 171 | 106 | (Sp, Sp, Sp, Sp, Sp, Sp, Sp, Sp, Rp, Sp Sp, Sp, Sp, Sp, Sp, Sp, Sp, Sp, | 18S/R⁹ |
| | | Sp)-(Gs5mCs5mCsTs5mCs)_{MOE}d[AsGsTs5mCsTsGs5mCsTsTs5mCs] | |
| | | (Gs5mCsAs5mCs5mC)_{MOE} | |
| 172 | 106 | (Sp, Rp, Sp, Sp, Sp, Sp, Sp, Sp, Sp, Sp Sp, Sp, Sp, Sp, Sp, Sp, Sp, Sp, | 18S/R² |
| | | Sp)-(Gs5mCs5mCsTs5mCs)_{MOE}d[AsGsTs5mCsTsGs5mCsTsTs5mCs] | |
| | | (Gs5mCsAs5mCs5mC)_{MOE} | |
| 173 | 106 | (Rp, Rp, Sp, Rp, Rp, Sp, Rp, Rp, Sp, Rp Rp, Sp, Rp, Rp, Sp, Rp, Rp, Sp, | (RRS)₆-R |
| | | Rp)-(Gs5mCs5mCsTs5mCs)_{MOE}d[AsGsTs5mCsTsGs5mCsTsTs5mCs] | |
| | | (Gs5mCsAs5mCs5mC)_{MOE} | |
| 174 | 106 | (Sp, Rp, Rp, Sp, Rp, Rp, Sp, Rp, Rp, Sp, Rp Rp, Sp, Rp, Rp, Sp, Rp, Rp, | S-(RRS)₆ |
| | | Sp)-(Gs5mCs5mCsTs5mCs)_{MOE}d[AsGsTs5mCsTsGs5mCsTsTs5mCs] | |
| | | (Gs5mCsAs5mCs5mC)_{MOE} | |
| 175 | 106 | (Rp, Sp, Rp, Rp, Sp, Rp, Rp, Sp, Rp Rp, Sp, Rp, Rp, Sp, Rp, Rp, Sp, Rp | RS-(RRS)₅- |
| | | Rp)(Gs5mCs5mCsTs5mCs)_{MOE}d[AsGsTs5mCsTsGs5mCsTsTs5mCs] | RR |
| | | (Gs5mCsAs5mCs5mC)_{MOE} | |
| 176 | 106 | (Rp, Sp, Rp, Rp, Sp, Rp, Rp, Sp, Rp Rp, Sp, Rp, Rp, Sp, Rp, Rp, Sp, Rp | RS-(RRS)₅- |
| | | Rp)(Gs15mCs15mCs1Ts15mCs1)_{MOE}d[As1Gs1Ts15mCs1Ts1Gs15m | RR |
| | | Cs1Ts1Ts15mCs1] (Gs15mCs1As15mCs15mC)_{MOE} | |
| 177 | 106 | (Rp, Sp, Rp, Rp, Sp, Rp, Rp, Sp, Rp Rp, Sp, Rp, Rp, Sp, Rp, Rp, Sp, Rp | RS-(RRS)₅- |
| | | Rp)(Gs15mCs15mCs1Ts15mCs1)_{MOE}d[AGT5mCTG5mCTT5mC] | RR |
| | | (Gs25mCs2As25mCs25mC)_{MOE} | |
| 178 | 106 | (Sp, Rp, Rp, Sp, Rp, Rp, Sp, Rp, Rp, Sp, Rp Rp, Sp, Rp, Rp, Sp, Rp, Rp, | S-(RRS)₆ |
| | | Sp)-(Gs5mCs5mCsTs5mCs)_{MOE}d[AsGsTs5mCsTsGs5mCsTsTs5mCs] | |
| | | (Gs5mCsAs5mCs5mC)_{F} (F: 2-fluorodeoxyribose) | |
| 179 | 106 | (Rp, Sp, Rp, Rp, Sp, Rp, Rp, Sp, Rp Rp, Sp, Rp, Rp, Sp, Rp, Rp, Sp, Rp | RS-(RRS)₅- |
| | | Rp)d[Gs8Cs8Cs8Ts8Cs8As8Gs8Ts8Cs8Ts8Gs8Cs8Ts8Ts8Cs8Gs8Cs | RR |
| | | 8As8Cs8C] | |
| 180 | 106 | (Rp, Sp, Rp, Rp, Sp, Rp, Rp, Sp, Rp Rp, Sp, Rp, Rp, Sp, Rp, Rp, Sp, Rp | RS-(RRS)₅- |
| | | Rp)d[Gs9Cs9Cs9Ts9Cs9As9Gs9Ts9Cs9Ts9Gs9Cs9Ts9Ts9Cs9Gs9Cs | RR |
| | | 9As9Cs9C] | |
| 181 | 106 | (Rp, Sp, Rp, Rp, Sp, Rp, Rp, Sp, Rp Rp, Sp, Rp, Rp, Sp, Rp, Rp, Sp, Rp | RS-(RRS)₅- |
| | | Rp)d[Gs10Cs10Cs10Ts10Cs10As10Gs10Ts10Cs10Ts10Gs10Cs10Ts10 | RR |
| | | Ts10Cs10Gs10Cs10As10Cs10C] | |
| 182 | 106 | (Rp, Sp, Rp, Rp, Sp, Rp, Rp, Sp, Rp Rp, Sp, Rp, Rp, Sp, Rp, Rp, Sp, Rp | RS-(RRS)₅- |
| | | Rp)d[Gs11Cs11Cs11Ts11Cs11As11Gs11Ts11Cs11Ts11Gs11Cs11Ts11 | RR |
| | | Ts11Cs11Gs11Cs11As11Cs11C] | |
| 183 | 106 | (Rp, Sp, Rp, Rp, Sp, Rp, Rp, Sp, Rp Rp, Sp, Rp, Rp, Sp, Rp, Rp, Sp, Rp | RS-(RRS)₅- |
| | | Rp)d[Gs12Cs12Cs12Ts12Cs12As12Gs12Ts12Cs12Ts12Gs12Cs12Ts12 | RR |
| | | Ts12Cs12Gs12Cs12As12Cs12C] | |
| 184 | 106 | (Rp, Sp, Rp, Rp, Sp, Rp, Rp, Sp, Rp Rp, Sp, Rp, Rp, Sp, Rp, Rp, Sp, Rp | RS-(RRS)₅- |
| | | Rp)d[Gs13Cs13Cs13Ts13Cs13As13Gs13Ts13Cs13Ts13Gs13Cs13Ts13 | RR |
| | | Ts13Cs13Gs13Cs13As13Cs13C] | |
| 185 | 106 | (Rp, Sp, Rp, Rp, Sp, Rp, Rp, Sp, Rp Rp, Sp, Rp, Rp, Sp, Rp, Rp, Sp, Rp | RS-(RRS)₅- |
| | | Rp)d[Gs14Cs14Cs14Ts14Cs14As14Gs14Ts14Cs14Ts14Gs14Cs14Ts14 | RR |
| | | Ts14Cs14Gs14Cs14As14Cs14C] | |
| 186 | 106 | (Rp, Sp, Rp, Rp, Sp, Rp, Rp, Sp, Rp Rp, Sp, Rp, Rp, Sp, Rp, Rp, Sp, Rp | RS-(RRS)₅- |
| | | Rp)d[Gs15Cs15Cs15Ts15Cs15As15Gs15Ts15Cs15Ts15Gs15Cs15Ts15 | RR |
| | | Ts15Cs15Gs15Cs15As15Cs15C] | |
| 187 | 110 | (Rp, Sp, Rp, Rp, Sp, Rp, Rp, Sp, Rp Rp, Sp, Rp, Rp, Sp, Rp, Rp, Sp, Rp | RS-(RRS)₅- |
| | | Rp)d[GsCsCs1TsCsAs]GsUs2CsUsGsd[CsTs3TsCsGs]CsAs4CsC | RR |
| 188 | 106 | (Sp, Sp, Sp, Sp, Sp, Rp, Rp, Rp, Rp, Rp Rp, Rp, Rp, Rp, Sp, Sp, Sp, Sp)- | 5S-9R-4S |
| | | d[GsCsCsTsCsAsGsTsCsTsGsCsTsTsCsGsCsACsC] | |
| 189 | 106 | (Sp, Sp, Sp, Sp, Sp, Rp, Rp, Rp, Rp, Rp Rp, Rp, Rp, Rp, Sp, Sp, Sp, Sp)- | 5S-9R-4S |
| | | d[Gs1Cs1Cs1Ts1Cs1As1Gs1Ts1Cs1Ts1Gs1Cs1Ts1Ts1Cs1Gs1CsACs | |
| | | 1C] | |
| 190 | 106 | (Sp, Sp, Sp, Sp, Sp, Rp, Rp, Rp, Rp, Rp Rp, Rp, Rp, Rp, Sp, Sp, Sp, Sp)- | 5S-9R-4S |
| | | d[Gs8Cs8Cs8Ts8Cs8As8Gs8Ts8Cs8Ts8Gs8Cs8Ts8Ts8Cs8Gs8Cs1A | |
| | | Cs8C] | |
| 191 | 106 | (Sp, Sp, Sp, Sp, Sp, Rp, Rp, Rp, Rp, Rp Rp, Rp, Rp, Rp, Sp, Sp, Sp, Sp)- | 5S-9R-4S |
| | | d[Gs9Cs9Cs9Ts9Cs9As9Gs9Ts9Cs9Ts9Gs9Cs9Ts9Ts9Cs9Gs9Cs1A | |
| | | Cs9C] | |
| 192 | 106 | (Sp, Sp, Sp, Sp, Sp, Rp, Rp, Rp, Rp, Rp Rp, Rp, Rp, Rp, Sp, Sp, Sp, Sp)- | 5S-9R-4S |
| | | d[Gs10Cs10Cs10Ts10Cs10As10Gs10Ts10Cs10Ts10Gs10Cs10Ts10Ts | |
| | | 10Cs10Gs10Cs1ACs10C] | |
| 193 | 106 | (Sp, Sp, Sp, Sp, Sp, Rp, Rp, Rp, Rp, Rp Rp, Rp, Rp, Rp, Sp, Sp, Sp, Sp)- | 5S-9R-4S |
| | | d[Gs11Cs11Cs11Ts11Cs11As11Gs11Ts11Cs11Ts11Gs11Cs11Ts11Ts | |
| | | 11Cs11Gs11Cs1ACs11C] | |
| 194 | 106 | (Sp, Sp, Sp, Sp, Sp, Rp, Rp, Rp, Rp, Rp Rp, Rp, Rp, Rp, Sp, Sp, Sp, Sp)- | 5S-9R-4S |
| | | d[Gs12Cs12Cs12Ts12Cs12As12Gs12Ts12Cs12Ts12Gs12Cs12Ts12Ts | |
| | | 12Cs12Gs12Cs1ACs12C] | |
| 195 | 106 | (Sp, Sp, Sp, Sp, Sp, Rp, Rp, Rp, Rp, Rp Rp, Rp, Rp, Rp, Sp, Sp, Sp, Sp)- | 5S-9R-4S |
| | | d[Gs13Cs13Cs13Ts13Cs13As13Gs13Ts13Cs13Ts13Gs13Cs13Ts13Ts | |
| | | 13Cs13Gs13Cs1ACs13C] | |
| 196 | 106 | (Sp, Sp, Sp, Sp, Sp, Rp, Rp, Rp, Rp, Rp Rp, Rp, Rp, Rp, Sp, Sp, Sp, Sp)- | 5S-9R-4S |
| | | d[Gs14Cs14Cs14Ts14Cs14As14Gs14Ts14Cs14Ts14Gs14Cs14Ts14Ts | |
| | | 14Cs14Gs14Cs1ACs14C] | |
| 197 | 106 | (Sp, Sp, Sp, Sp, Sp, Rp, Rp, Rp, Rp, Rp Rp, Rp, Rp, Rp, Sp, Sp, Sp, Sp)- | 5S-9R-4S |
| | | d[Gs15Cs15Cs15Ts15Cs15As15Gs15Ts15Cs15Ts15Gs15Cs15Ts15Ts | |
| | | 15Cs15Gs15Cs1ACs15C] | |
| 198 | 111 | (Sp, Sp, Sp, Sp, Sp, Rp, Rp, Rp, Rp, Rp Rp, Rp, Rp, Rp, Sp, Sp, Sp, Sp)- | 5S-9R-4S |
| | | GsCsCsUsCsAsGsUsCsUsGsCsUsUsCsGsCsACsC | |
| 199 | 111 | (Sp, Sp, Sp, Sp, Sp, Rp, Rp, Rp, Rp, Rp Rp, Rp, Rp, Rp, Sp, Sp, Sp, Sp)- | 5S-9R-4S |
| | | Gs1Cs1Cs1Us1Cs1As1Gs1Us1Cs1Us1Gs1Cs1Us1Us1Cs1Gs1CsACs | |
| | | 1C | |
| 200 | 111 | (Sp, Sp, Sp, Sp, Sp, Rp, Rp, Rp, Rp, Rp Rp, Rp, Rp, Rp, Sp, Sp, Sp, Sp)- | 5S-9R-4S |
| | | Gs8Cs8Cs8Us8Cs8As8Gs8Us8Cs8Us8Gs8Cs8Us8Us8Cs8Gs8Cs1AC | |
| | | s8C | |
| 201 | 111 | (Sp, Sp, Sp, Sp, Sp, Rp, Rp, Rp, Rp, Rp Rp, Rp, Rp, Rp, Sp, Sp, Sp, Sp)- | 5S-9R-4S |
| | | Gs9Cs9Cs9Us9Cs9As9Gs9Us9Cs9Us9Gs9Cs9Us9Us9Cs9Gs9Cs1AC | |
| | | s9C | |
| 202 | 111 | (Sp, Sp, Sp, Sp, Sp, Rp, Rp, Rp, Rp, Rp Rp, Rp, Rp, Rp, Sp, Sp, Sp, Sp)- | 5S-9R-4S |
| | | Gs10Cs10Cs10Us10Cs10As10Gs10Us10Cs10Us10Gs10Cs10Us10Us | |
| | | 10Cs10Gs10Cs1ACs10C | |
| 203 | 111 | (Sp, Sp, Sp, Sp, Sp, Rp, Rp, Rp, Rp, Rp Rp, Rp, Rp, Rp, Sp, Sp, Sp, Sp)- | 5S-9R-4S |
| | | Gs11Cs11Cs11Us11Cs11As11Gs11Us11Cs11Us11Gs11Cs11Us11Us | |
| | | 11Cs11Gs11Cs1ACs11C | |
| 204 | 111 | (Sp, Sp, Sp, Sp, Sp, Rp, Rp, Rp, Rp, Rp Rp, Rp, Rp, Rp, Sp, Sp, Sp, Sp)- | 5S-9R-4S |
| | | Gs12Cs12Cs12Us12Cs12As12Gs12Us12Cs12Us12Gs12Cs12Us12Us | |
| | | 12Cs12Gs12Cs1ACs12C | |
| 205 | 111 | (Sp, Sp, Sp, Sp, Sp, Rp, Rp, Rp, Rp, Rp Rp, Rp, Rp, Rp, Sp, Sp, Sp, Sp)- | 5S-9R-4S |
| | | Gs13Cs13Cs13Us13Cs13As13Gs13Us13Cs13Us13Gs13Cs13Us13Us | |
| | | 13Cs13Gs13Cs1ACs13C | |
| 206 | 111 | (Sp, Sp, Sp, Sp, Sp, Rp, Rp, Rp, Rp, Rp Rp, Rp, Rp, Rp, Sp, Sp, Sp, Sp)- | 5S-9R-4S |
| | | Gs14Cs14Cs14Us14Cs14As14Gs14Us14Cs14Us14Gs14Cs14Us14Us | |
| | | 14Cs14Gs14Cs1ACs14C | |
| 207 | 111 | (Sp, Sp, Sp, Sp, Sp, Rp, Rp, Rp, Rp, Rp Rp, Rp, Rp, Rp, Sp, Sp, Sp, Sp)- | 5S-9R-4S |
| | | Gs15Cs15Cs15Us15Cs15As15Gs15Us15Cs15Us15Gs15Cs15Us15Us | |
| | | 15Cs15Gs15Cs1ACs15C | |

[0528] In some embodiments, a chirally controlled oligonucleotide is designed such that one or more nucleotides comprise a phosphorus modification prone to “autorelease” under certain conditions. That is, under certain conditions, a particular phosphorus modification is designed such that it self-cleaves from the oligonucleotide to provide, e.g., a phosphate diester such as those found in naturally occurring DNA and RNA. In some embodiments, such a phosphorus modification has a structure of —O-L-R¹, wherein each of L and R¹ is independently as defined above and described herein. In some embodiments, an autorelease group comprises a morpholino group. In some embodiments, an autorelease group is characterized by the ability to deliver an agent to the internucleotidic phosphorus linker, which agent facilitates further modification of the phosphorus atom such as, e.g., desulfurization. In some embodiments, the agent is water and the further modification is hydrolysis to form a phosphate diester as is found in naturally occurring DNA and RNA.

[0529] In some embodiments, a chirally controlled oligonucleotide is designed such that the resulting pharmaceutical properties are improved through one or more particular modifications at phosphorus. It is well documented in the art that certain oligonucleotides are rapidly degraded by nucleases and exhibit poor cellular uptake through the cytoplasmic cell membrane (Poijarvi-Virta et al., Curr. Med. Chem. (2006), 13 (28); 3441-65; Wagner et al., Med. Res. Rev. (2000), 20(6):417-51; Peyrottes et al., Mini Rev. Med. Chem. (2004), 4(4):395-408; Gosselin et al., (1996), 43(1):196-208; Bologna et al., (2002), Antisense & Nucleic Acid Drug Development 12:33-41). For instance, Vives et al., (Nucleic Acids Research (1999), 27(20):4071-76) found that tert-butyl SATE pro-oligonucleotides displayed markedly increased cellular penetration compared to the parent oligonucleotide.

[0530] In some embodiments, a modification at a linkage phosphorus is characterized by its ability to be transformed to a phosphate diester, such as those present in naturally occurring DNA and RNA, by one or more esterases, nucleases, and/or cytochrome P450 enzymes, including but not limited to, those listed in Table 3, below.

TABLE 3
Exemplary enzymes.

| Family | Gene |
|---|---|
| CYP1 | CYP1A1, CYP1A2, CYP1B1 |
| CYP2 | CYP2A6, CYP2A7, CYP2A13, CYP2B6, |
| | CYP2C8, CYP2C9, CYP2C18, CYP2C19, |
| | CYP2D6, CYP2E1, CYP2F1, CYP2J2, |
| | CYP2R1, CYP2S1, CYP2U1, CYP2W1 |
| CYP3 | CYP3A4, CYP3A5, CYP3A7, CYP3A43 |
| CYP4 | CYP4A11, CYP4A22, CYP4B1, CYP4F2, |
| | CYP4F3, CYP4F8, CYP4F11, CYP4F12, |
| | CYP4F22, CYP4V2, CYP4X1, CYP4Z1 |
| CYP5 | CYP5A1 |
| CYP7 | CYP7A1, CYP7B1 |
| CYP8 | CYP8A1 (prostacyclin synthase), CYP8B1 |
| | (bile acid biosynthesis) |
| CYP11 | CYP11A1, CYP11B1, CYP11B2 |
| CYP17 | CYP17A1 |
| CYP19 | CYP19A1 |
| CYP20 | CYP20A1 |
| CYP21 | CYP21A2 |
| CYP24 | CYP24A1 |
| CYP26 | CYP26A1, CYP26B1, CYP26C1 |
| CYP27 | CYP27A1 (bile acid biosynthesis), CYP27B1 |
| | (vitamin D3 1-alpha hydroxylase, activates |
| | vitamin D3), CYP27C1 (unknown function) |
| CYP39 | CYP39A1 |
| CYP46 | CYP46A1 |
| CYP51 | CYP51A1 (lanosterol 14-alpha demethylase) |

[0531] In some embodiments, a modification at phosphorus results in a P-modification moiety characterized in that it acts as a pro-drug, e.g., the P-modification moiety facilitates delivery of an oligonucleotide to a desired location prior to removal. For instance, in some embodiments, a P-modification moiety results from PEGylation at the linkage phosphorus. One of skill in the relevant arts will appreciate that various PEG chain lengths are useful and that the selection of chain length will be determined in part by the result that is sought to be achieved by PEGylation. For instance, in some embodiments, PEGylation is effected in order to reduce RES uptake and extend in vivo circulation lifetime of an oligonucleotide.

[0532] In some embodiments, a PEGylation reagent for use in accordance with the present invention is of a molecular weight of about 300 g/mol to about 100,000 g/mol. In some embodiments, a PEGylation reagent is of a molecular weight of about 300 g/mol to about 10,000 g/mol. In some embodiments, a PEGylation reagent is of a molecular weight of about 300 g/mol to about 5,000 g/mol. In some embodiments, a PEGylation reagent is of a molecular weight of about 500 g/mol. In some embodiments, a PEGylation reagent of a molecular weight of about 1000 g/mol. In some embodiments, a PEGylation reagent is of a molecular weight of about 3000 g/mol. In some embodiments, a PEGylation reagent is of a molecular weight of about 5000 g/mol.

[0533] In certain embodiments, a PEGylation reagent is PEG500. In certain embodiments, a PEGylation reagent is PEG1000. In certain embodiments, a PEGylation reagent is PEG3000. In certain embodiments, a PEGylation reagent is PEG5000.

[0534] In some embodiments, a P-modification moiety is characterized in that it acts as a PK enhancer, e.g., lipids, PEGylated lipids, etc.

[0535] In some embodiments, a P-modification moiety is characterized in that it acts as an agent which promotes cell entry and/or endosomal escape, such as a membrane-disruptive lipid or peptide.

[0536] In some embodiments, a P-modification moiety is characterized in that it acts as a targeting agent. In some embodiments, a P-modification moiety is or comprises a targeting agent. The phrase “targeting agent,” as used herein, is an entity that is associates with a payload of interest (e.g., with an oligonucleotide or oligonucleotide composition) and also interacts with a target site of interest so that the payload of interest is targeted to the target site of interest when associated with the targeting agent to a materially greater extent than is observed under otherwise comparable conditions when the payload of interest is not associated with the targeting agent. A targeting agent may be, or comprise, any of a variety of chemical moieties, including, for example, small molecule moieties, nucleic acids, polypeptides, carbohydrates, etc. Targeting agents are described further by Adarsh et al., “Organelle Specific Targeted Drug Delivery—A Review,” International Journal of Research in Pharmaceutical and Biomedical Sciences, 2011, p. 895.

[0537] Exemplary such targeting agents include, but are not limited to, proteins (e.g. Transferrin), oligopeptides (e.g., cyclic and acylic RGD-containing oligopeptides), antibodies (monoclonal and polyclonal antibodies, e.g. IgG, IgA, IgM, IgD, IgE antibodies), sugars/carbohydrates (e.g., monosaccharides and/or oligosaccharides (mannose, mannose-6-phosphate, galactose, and the like)), vitamins (e.g., folate), or other small biomolecules. In some embodiments, a targeting moiety is a steroid molecule (e.g., bile acids including cholic acid, deoxycholic acid, dehydrocholic acid; cortisone; digoxigenin; testosterone; cholesterol; cationic steroids such as cortisone having a trimethylaminomethyl hydrazide group attached via a double bond at the 3-position of the cortisone ring, etc.). In some embodiments, a targeting moiety is a lipophilic molecule (e.g., alicyclic hydrocarbons, saturated and unsaturated fatty acids, waxes, terpenes, and polyalicyclic hydrocarbons such as adamantine and buckminsterfullerenes). In some embodiments, a lipophilic molecule is a terpenoid such as vitamin A, retinoic acid, retinal, or dehydroretinal. In some embodiments, a targeting moiety is a peptide.

[0538] In some embodiments, a P-modification moiety is a targeting agent of formula —X-L-R¹ wherein each of X, L, and R¹ are as defined in Formula I above.

[0539] In some embodiments, a P-modification moiety is characterized in that it facilitates cell specific delivery.

[0540] In some embodiments, a P-modification moiety is characterized in that it falls into one or more of the above-described categories. For instance, in some embodiments, a P-modification moiety acts as a PK enhancer and a targeting ligand. In some embodiments, a P-modification moiety acts as a pro-drug and an endosomal escape agent. One of skill in the relevant arts would recognize that numerous other such combinations are possible and are contemplated by the present invention.

### Nucleobases

[0541] In some embodiments, a nucleobase present in a provided oligonucleotide is a natural nucleobase or a modified nucleobase derived from a natural nucleobase. Examples include, but are not limited to, uracil, thymine, adenine, cytosine, and guanine having their respective amino groups protected by acyl protecting groups, 2-fluorouracil, 2-fluorocytosine, 5-bromouracil, 5-iodouracil, 2,6-diaminopurine, azacytosine, pyrimidine analogs such as pseudoisocytosine and pseudouracil and other modified nucleobases such as 8-substituted purines, xanthine, or hypoxanthine (the latter two being the natural degradation products). Exemplary modified nucleobases are disclosed in Chiu and Rana, RNA, 2003, 9, 1034-1048, Limbach et al. Nucleic Acids Research, 1994, 22, 2183-2196 and Revankar and Rao, Comprehensive Natural Products Chemistry, vol. 7, 313.

[0542] Compounds represented by the following general formulae are also contemplated as modified nucleobases:

[chemical structure]

wherein R⁸ is an optionally substituted, linear or branched group selected from aliphatic, aryl, aralkyl, aryloxylalkyl, carbocyclyl, heterocyclyl or heteroaryl group having 1 to 15 carbon atoms, including, by way of example only, a methyl, isopropyl, phenyl, benzyl, or phenoxymethyl group; and each of R⁹ and R¹⁰ is independently an optionally substituted group selected from linear or branched aliphatic, carbocyclyl, aryl, heterocyclyl and heteroaryl.

[0543] Modified nucleobases also include expanded-size nucleobases in which one or more aryl rings, such as phenyl rings, have been added. Nucleic base replacements described in the Glen Research catalog (www.glenresearch.com); Krueger A T et al, Acc. Chem. Res., 2007, 40, 141-150; Kool, ET, Acc. Chem. Res., 2002, 35, 936-943; Benner S. A., et al., Nat. Rev. Genet., 2005, 6, 553-543; Romesberg, F. E., et al., Curr. Opin. Chem. Biol., 2003, 7, 723-733; Hirao, I., Curr. Opin. Chem. Biol., 2006, 10, 622-627, are contemplated as useful for the synthesis of the nucleic acids described herein. Some examples of these expanded-size nucleobases are shown below:

[chemical structure]

[0544] Herein, modified nucleobases also encompass structures that are not considered nucleobases but are other moieties such as, but not limited to, corrin- or porphyrin-derived rings. Porphyrin-derived base replacements have been described in Morales-Rojas, H and Kool, ET, Org. Lett., 2002, 4, 4377-4380. Shown below is an example of a porphyrin-derived ring which can be used as a base replacement:

[chemical structure]

[0545] In some embodiments, modified nucleobases are of any one of the following structures, optionally substituted:

[chemical structure]

[0546] In some embodiments, a modified nucleobase is fluorescent. Exemplary such fluorescent modified nucleobases include phenanthrene, pyrene, stillbene, isoxanthine, isozanthopterin, terphenyl, terthiophene, benzoterthiophene, coumarin, lumazine, tethered stillbene, benzo-uracil, and naphtho-uracil, as shown below:

[chemical structure]

[0547] In some embodiments, a modified nucleobase is unsubstituted. In some embodiments, a modified nucleobase is substituted. In some embodiments, a modified nucleobase is substituted such that it contains, e.g., heteroatoms, alkyl groups, or linking moieties connected to fluorescent moieties, biotin or avidin moieties, or other protein or peptides. In some embodiments, a modified nucleobase is a “universal base” that is not a nucleobase in the most classical sense, but that functions similarly to a nucleobase. One representative example of such a universal base is 3-nitropyrrole.

[0548] In some embodiments, other nucleosides can also be used in the process disclosed herein and include nucleosides that incorporate modified nucleobases, or nucleobases covalently bound to modified sugars. Some examples of nucleosides that incorporate modified nucleobases include 4-acetylcytidine; 5-(carboxyhydroxylmethyl)uridine; 2′-O-methylcytidine; 5-carboxymethylaminomethyl-2-thiouridine; 5-carboxymethylaminomethyluridine; dihydrouridine; 2′-O-methylpseudouridine; beta,D-galactosylqueosine; 2′-O-methylguanosine; N⁶-isopentenyladenosine; 1-methyladenosine; 1-methylpseudouridine; 1-methylguanosine; 1-methylinosine; 2,2-dimethylguanosine; 2-methyladenosine; 2-methylguanosine; N⁷-methylguanosine; 3-methyl-cytidine; 5-methylcytidine; 5-hydroxymethylcytidine; 5-formylcytosine; 5-carboxylcytosine; N⁶-methyladenosine; 7-methylguanosine; 5-methylaminoethyluridine; 5-methoxyaminomethyl-2-thiouridine; beta,D-mannosylqueosine; 5-methoxycarbonylmethyluridine; 5-methoxyuridine; 2-methylthio-N⁶-isopentenyladenosine; N-((9-beta,D-ribofuranosyl-2-methylthiopurine-6-yl)carbamoyl)threonine; N-((9-beta,D-ribofuranosylpurine-6-yl)-N-methylcarbamoyl)threonine; uridine-5-oxyacetic acid methylester; uridine-5-oxyacetic acid (v); pseudouridine; queosine; 2-thiocytidine; 5-methyl-2-thiouridine; 2-thiouridine; 4-thiouridine; 5-methyluridine; 2′-O-methyl-5-methyluridine; and 2′-O-methyluridine.

[0549] In some embodiments, nucleosides include 6′-modified bicyclic nucleoside analogs that have either (R) or (S)-chirality at the 6′-position and include the analogs described in U.S. Pat. No. 7,399,845. In other embodiments, nucleosides include 5′-modified bicyclic nucleoside analogs that have either (R) or (S)-chirality at the 5′-position and include the analogs described in US Patent Application Publication No. 20070287831.

[0550] In some embodiments, a nucleobase or modified nucleobase comprises one or more biomolecule binding moieties such as e.g., antibodies, antibody fragments, biotin, avidin, streptavidin, receptor ligands, or chelating moieties. In other embodiments, a nucleobase or modified nucleobase is 5-bromouracil, 5-iodouracil, or 2,6-diaminopurine. In some embodiments, a nucleobase or modified nucleobase is modified by substitution with a fluorescent or biomolecule binding moiety. In some embodiments, the substituent on a nucleobase or modified nucleobase is a fluorescent moiety. In some embodiments, the substituent on a nucleobase or modified nucleobase is biotin or avidin.

[0551] Representative U.S. patents that teach the preparation of certain of the above noted modified nucleobases as well as other modified nucleobases include, but are not limited to, the above noted U.S. Pat. No. 3,687,808, as well as U.S. Pat. Nos. 4,845,205; 5,130,30; 5,134,066; 5,175,273; 5,367,066; 5,432,272; 5,457,187; 5,457,191; 5,459,255; 5,484,908; 5,502,177; 5,525,711; 5,552,540; 5,587,469; 5,594,121, 5,596,091; 5,614,617; 5,681,941; 5,750,692; 6,015,886; 6,147,200; 6,166,197; 6,222,025; 6,235,887; 6,380,368; 6,528,640; 6,639,062; 6,617,438; 7,045,610; 7,427,672; and 7,495,088, each of which is herein incorporated by reference in its entirety.

### Sugars

[0552] The most common naturally occurring nucleotides are comprised of ribose sugars linked to the nucleobases adenosine (A), cytosine (C), guanine (G), and thymine (T) or uracil (U). Also contemplated are modified nucleotides wherein a phosphate group or linkage phosphorus in the nucleotides can be linked to various positions of a sugar or modified sugar. As non-limiting examples, the phosphate group or linkage phosphorus can be linked to the 2′, 3′, 4′ or 5′ hydroxyl moiety of a sugar or modified sugar. Nucleotides that incorporate modified nucleobases as described herein are also contemplated in this context. In some embodiments, nucleotides or modified nucleotides comprising an unprotected —OH moiety are used in accordance with methods of the present invention.

[0553] Other modified sugars can also be incorporated within a provided oligonucleotide. In some embodiments, a modified sugar contains one or more substituents at the 2′ position including one of the following: —F; —CF₃, —CN, —N₃, —NO, —NO₂, —OR′, —SR′, or —N(R′)₂, wherein each R′ is independently as defined above and described herein; —O—(C₁-C₁₀ alkyl), —S—(C₁-C₁₀ alkyl), —NH—(C₁-C₁₀ alkyl), or —N(C₁-C₁₀ alkyl)₂; —O—(C₂-C₁₀ alkenyl), —S—(C₂-C₁₀ alkenyl), —NH—(C₂-C₁₀ alkenyl), or —N(C₂-C₁₀ alkenyl)₂; —O—(C₂-C₁₀ alkynyl), —S—(C₂-C₁₀ alkynyl), —NH—(C₂-C₁₀ alkynyl), or —N(C₂-C₁₀ alkynyl)₂; or —O—(C₁-C₁₀ alkylene)-, —(C₁-C₁₀ alkyl), —O—(C₁-C₁₀ alkylene)-NH—(C₁-C₁₀ alkyl) or —O—(C₁-C₁₀ alkylene)-NH(C₁-C₁₀ alkyl)₂, —NH—(C₁-C₁₀ alkylene)-O—(C₁-C₁₀ alkyl), or —N(C₁-C₁₀ alkyl)-(C₁-C₁₀ alkylene)-O—(C₁-C₁₀ alkyl), wherein the alkyl, alkylene, alkenyl and alkynyl may be substituted or unsubstituted. Examples of substituents include, and are not limited to, —O(CH₂)ₙOCH₃, and —O(CH₂)ₙNH₂, wherein n is from 1 to about 10, MOE, DMAOE, DMAEOE. Also contemplated herein are modified sugars described in WO 2001/088198; and Martin et al., Helv. Chim. Acta, 1995, 78, 486-504. In some embodiments, a modified sugar comprises one or more groups selected from a substituted silyl group, an RNA cleaving group, a reporter group, a fluorescent label, an intercalator, a group for improving the pharmacokinetic properties of a nucleic acid, a group for improving the pharmacodynamic properties of a nucleic acid, or other substituents having similar properties. In some embodiments, modifications are made at one or more of the the 2′, 3′, 4′, 5′, or 6′ positions of the sugar or modified sugar, including the 3′ position of the sugar on the 3′-terminal nucleotide or in the 5′ position of the 5′-terminal nucleotide.

[0554] In some embodiments, the 2′-OH of a ribose is replaced with a substituent including one of the following: —H, —F; —CF₃, —CN, —N₃, —NO, —NO₂, —OR′, —SR′, or —N(R′)₂, wherein each R′ is independently as defined above and described herein; —O—(C₁-C₁₀ alkyl), —S—(C₁-C₁₀ alkyl), —NH—(C₁-C₁₀ alkyl), or —N(C₁-C₁₀ alkyl)₂; —O—(C₂-C₁₀ alkenyl), —S—(C₂-C₁₀ alkenyl), —NH—(C₂-C₁₀ alkenyl), or —N(C₂-C₁₀ alkenyl)₂; —O—(C₂-C₁₀ alkynyl), —S—(C₂-C₁₀ alkynyl), —NH—(C₂-C₁₀ alkynyl), or —N(C₂-C₁₀ alkynyl)₂; or —O—(C₁-C₁₀ alkylene)-O—(C₁-C₁₀ alkyl), —O—(C₁-C₁₀ alkylene)-NH—(C₁-C₁₀ alkyl) or —O—(C₁-C₁₀ alkylene)-NH(C₁-C₁₀ alkyl)₂, —NH—(C₁-C₁₀ alkylene)-O—(C₁-C₁₀ alkyl), or —N(C₁-C₁₀ alkyl)-(C₁-C₁₀ alkylene)-O—(C₁-C₁₀ alkyl), wherein the alkyl, alkylene, alkenyl and alkynyl may be substituted or unsubstituted. In some embodiments, the 2′-OH is replaced with —H (deoxyribose). In some embodiments, the 2′-OH is replaced with —F. In some embodiments, the 2′-OH is replaced with —OR′. In some embodiments, the 2′-OH is replaced with —OMe. In some embodiments, the 2′-OH is replaced with —OCH₂CH₂OMe.

[0555] Modified sugars also include locked nucleic acids (LNAs). In some embodiments, the locked nucleic acid has the structure indicated below. A locked nucleic acid of the structure below is indicated, wherein Ba represents a nucleobase or modified nucleobase as described herein, and wherein R^{2s} is —OCH₂C4′—.

[chemical structure]

[0556] In some embodiments, a modified sugar is an ENA such as those described in, e.g., Seth et al., J Am Chem Soc. 2010 Oct. 27; 132(42): 14942-14950. In some embodiments, a modified sugar is any of those found in an XNA (xenonucleic acid), for instance, arabinose, anhydrohexitol, threose, 2′fluoroarabinose, or cyclohexene.

[0557] Modified sugars include sugar mimetics such as cyclobutyl or cyclopentyl moieties in place of the pentofuranosyl sugar. Representative United States patents that teach the preparation of such modified sugar structures include, but are not limited to, U.S. Pat. Nos. 4,981,957; 5,118,800; 5,319,080; and 5,359,044. Some modified sugars that are contemplated include sugars in which the oxygen atom within the ribose ring is replaced by nitrogen, sulfur, selenium, or carbon. In some embodiments, a modified sugar is a modified ribose wherein the oxygen atom within the ribose ring is replaced with nitrogen, and wherein the nitrogen is optionally substituted with an alkyl group (e.g., methyl, ethyl, isopropyl, etc).

[0558] Non-limiting examples of modified sugars include glycerol, which form glycerol nucleic acid (GNA) analogues. One example of a GNA analogue is shown below and is described in Zhang, R et al., J. Am. Chem. Soc., 2008, 130, 5846-5847; Zhang L, et al., J. Am. Chem. Soc., 2005, 127, 4174-4175 and Tsai C H et al., PNAS, 2007, 14598-14603 (X═O⁻):

[chemical structure]

[0559] Another example of a GNA derived analogue, flexible nucleic acid (FNA) based on the mixed acetal aminal of formyl glycerol, is described in Joyce G F et al., PNAS, 1987, 84, 4398-4402 and Heuberger B D and Switzer C, J. Am. Chem. Soc., 2008, 130, 412-413, and is shown below:

[chemical structure]

[0560] Additional non-limiting examples of modified sugars include hexopyranosyl (6′ to 4′), pentopyranosyl (4′ to 2′), pentopyranosyl (4′ to 3′), or tetrofuranosyl (3′ to 2′) sugars. In some embodiments, a hexopyranosyl (6′ to 4′) sugar is of any one of the following formulae:

[chemical structure]

wherein X^{s} corresponds to the P-modification group “—XLR¹” described herein and Ba is as defined herein.

[0561] In some embodiments, a pentopyranosyl (4′ to 2′) sugar is of any one of the following formulae:

[chemical structure]

wherein X^{s} corresponds to the P-modification group “—XLR¹” described herein and Ba is as defined herein.

[0562] In some embodiments, a pentopyranosyl (4′ to 3′) sugar is of any one of the following formulae:

[chemical structure]

wherein X^{s} corresponds to the P-modification group “—XLR¹” described herein and Ba is as defined herein.

[0563] In some embodiments, a tetrofuranosyl (3′ to 2′) sugar is of either of the following formulae:

[chemical structure]

wherein X^{s} corresponds to the P-modification group “—XLR¹” described herein and Ba is as defined herein.

[0564] In some embodiments, a modified sugar is of any one of the following formulae:

[chemical structure]

[chemical structure]

wherein X^{s} corresponds to the P-modification group “—XLR¹” described herein and Ba is as defined herein.

[0565] In some embodiments, one or more hydroxyl group in a sugar moiety is optionally and independently replaced with halogen, R′—N(R′)₂, —OR′, or —SR′, wherein each R′ is independently as defined above and described herein.

[0566] In some embodiments, a sugar mimetic is as illustrated below, wherein X^{s} corresponds to the P-modification group “—XLR¹” described herein, Ba is as defined herein, and X¹ is selected from —S—, —Se—, —CH₂—., —NMe-, —NEt- or —NiPr—.

[chemical structure]

[chemical structure]

[0567] In some embodiments, at least 1%, 2%, 3%, 4%, 5%, 6%, 7%, 8%, 9%, 10%, 11%, 12%, 13%, 14%, 15%, 16%, 17%, 18%, 19%, 20%, 21%, 22%, 23%, 24%, 25%, 26%, 27%, 28%, 29%, 30%, 31%, 32%, 33%, 34%, 35%, 36%, 37%, 38%, 39%, 40%, 41%, 42%, 43%, 44%, 45%, 46%, 47%, 48%, 49%, 50% or more (e.g., 55%, 60%, 65%, 70%, 75%, 80%, 85%, 90%, 95% or more), inclusive, of the sugars in a chirally controlled oligonucleotide composition are modified. In some embodiments, only purine residues are modified (e.g., about 1%, 2%, 3%, 4%, 5%, 6%, 7%, 8%, 9%, 10%, 11%, 12%, 13%, 14%, 15%, 16%, 17%, 18%, 19%, 20%, 21%, 22%, 23%, 24%, 25%, 26%, 27%, 28%, 29%, 30%, 31%, 32%, 33%, 34%, 35%, 36%, 37%, 38%, 39%, 40%, 41%, 42%, 43%, 44%, 45%, 46%, 47%, 48%, 49%, 50% or more [e.g., 55%, 60%, 65%, 70%, 75%, 80%, 85%, 90%, 95% or more] of the purine residues are modified). In some embodiments, only pyrimidine residues are modified (e.g., about 1%, 2%, 3%, 4%, 5%, 6%, 7%, 8%, 9%, 10%, 11%, 12%, 13%, 14%, 15%, 16%, 17%, 18%, 19%, 20%, 21%, 22%, 23%, 24%, 25%, 26%, 27%, 28%, 29%, 30%, 31%, 32%, 33%, 34%, 35%, 36%, 37%, 38%, 39%, 40%, 41%, 42%, 43%, 44%, 45%, 46%, 47%, 48%, 49%, 50% or more [e.g., 55%, 60%, 65%, 70%, 75%, 80%, 85%, 90%, 95% or more] of the pyridimine residues are modified). In some embodiments, both purine and pyrimidine residues are modified.

[0568] Modified sugars and sugar mimetics can be prepared by methods known in the art, including, but not limited to: A. Eschenmoser, Science (1999), 284:2118; M. Bohringer et al, Helv. Chim. Acta (1992), 75:1416-1477; M. Egli et al, J. Am. Chem. Soc. (2006), 128(33):10847-56; A. Eschenmoser in Chemical Synthesis: Gnosis to Prognosis, C. Chatgilialoglu and V. Sniekus, Ed., (Kluwer Academic, Netherlands, 1996), p. 293; K.-U. Schoning et al, Science (2000), 290:1347-1351; A. Eschenmoser et al, Helv. Chim. Acta (1992), 75:218; J. Hunziker et al, Helv. Chim. Acta (1993), 76:259; G. Otting et al, Helv. Chim. Acta (1993), 76:2701; K. Groebke et al, Helv. Chim. Acta (1998), 81:375; and A. Eschenmoser, Science (1999), 284:2118. Modifications to the 2′ modifications can be found in Verma, S. et al. Annu. Rev. Biochem. 1998, 67, 99-134 and all references therein. Specific modifications to the ribose can be found in the following references: 2′-fluoro (Kawasaki et. al., J. Med. Chem., 1993, 36, 831-841), 2′-MOE (Martin, P. Helv. Chim. Acta 1996, 79, 1930-1938), “LNA” (Wengel, J. Acc. Chem. Res. 1999, 32, 301-310). In some embodiments, a modified sugar is any of those described in PCT Publication No. WO2012/030683, incorporated herein by reference, and depicted in the FIGS. 26-30 of the present application.

### Oligonucleotides

[0569] In some embodiments, the present invention provides oligonucleotides and oligonucleotide compositions that are chirally controlled. For instance, in some embodiments, a provided composition contains predetermined levels of one or more individual oligonucleotide types, wherein an oligonucleotide type is defined by: 1) base sequence; 2) pattern of backbone linkages; 3) pattern of backbone chiral centers; and 4) pattern of backbone P-modifications.

[0570] In some embodiments, a provided oligonucleotide is a unimer. In some embodiments, a provided oligonucleotide is a P-modification unimer. In some embodiments, a provided oligonucleotide is a stereounimer. In some embodiments, a provided oligonucleotide is a stereounimer of configuration Rp. In some embodiments, a provided oligonucleotide is a stereounimer of configuration Sp.

[0571] In some embodiments, a provided oligonucleotide is an altmer. In some embodiments, a provided oligonucleotide is a P-modification altmer. In some embodiments, a provided oligonucleotide is a stereoaltmer.

[0572] In some embodiments, a provided oligonucleotide is a blockmer. In some embodiments, a provided oligonucleotide is a P-modification blockmer. In some embodiments, a provided oligonucleotide is a stereoblockmer.

[0573] In some embodiments, a provided oligonucleotide is a gapmer.

[0574] In some embodiments, a provided oligonucleotide is a skipmer.

[0575] In some embodiments, a provided oligonucleotide is a combination of one or more of unimer, altmer, blockmer, gapmer, and skipmer. For instance, in some embodiments, a provided oligonucleotide is both an altmer and a gapmer. In some embodiments, a provided nucleotide is both a gapmer and a skipmer. One of skill in the chemical and synthetic arts will recognize that numerous other combinations of patterns are available and are limited only by the commercial availability and/or synthetic accessibility of constituent parts required to synthesize a provided oligonucleotide in accordance with methods of the present invention.

[0576] In some embodiments, a provided oligonucleotide comprises one or more optionally substituted nucleotides. In some embodiments, a provided oligonucleotide comprises one or more modified nucleotides. In some embodiments, a provided oligonucleotide comprises one or more optionally substituted nucleosides. In some embodiments, a provided oligonucleotide comprises one or more modified nucleosides. In some embodiments, a provided oligonucleotide comprises one or more optionally substituted LNAs.

[0577] In some embodiments, a provided oligonucleotide comprises one or more optionally substituted nucleobases. In some embodiments, a provided oligonucleotide comprises one or more optionally substituted natural nucleobases. In some embodiments, a provided oligonucleotide comprises one or more optionally substituted modified nucleobases. In some embodiments, a provided oligonucleotide comprises one or more 5-methylcytidine; 5-hydroxymethylcytidine, 5-formylcytosine, or 5-carboxylcytosine. In some embodiments, a provided oligonucleotide comprises one or more 5-methylcytidine.

[0578] In some embodiments, a provided oligonucleotide comprises one or more optionally substituted sugars. In some embodiments, a provided oligonucleotide comprises one or more optionally substituted sugars found in naturally occurring DNA and RNA. In some embodiments, a provided oligonucleotide comprises one or more optionally substituted ribose or deoxyribose. In some embodiments, a provided oligonucleotide comprises one or more optionally substituted ribose or deoxyribose, wherein one or more hydroxyl groups of the ribose or deoxyribose moiety is optionally and independently replaced by halogen, R′, —N(R′)₂, —OR′, or —SR′, wherein each R′ is independently as defined above and described herein. In some embodiments, a provided oligonucleotide comprises one or more optionally substituted deoxyribose, wherein the 2′ position of the deoxyribose is optionally and independently substituted with halogen, R′, —N(R′)₂, —OR′, or —SR′, wherein each R′ is independently as defined above and described herein. In some embodiments, a provided oligonucleotide comprises one or more optionally substituted deoxyribose, wherein the 2′ position of the deoxyribose is optionally and independently substituted with halogen. In some embodiments, a provided oligonucleotide comprises one or more optionally substituted deoxyribose, wherein the 2′ position of the deoxyribose is optionally and independently substituted with one or more —F. halogen. In some embodiments, a provided oligonucleotide comprises one or more optionally substituted deoxyribose, wherein the 2′ position of the deoxyribose is optionally and independently substituted with —OR′, wherein each R′ is independently as defined above and described herein. In some embodiments, a provided oligonucleotide comprises one or more optionally substituted deoxyribose, wherein the 2′ position of the deoxyribose is optionally and independently substituted with —OR′, wherein each R′ is independently an optionally substituted C₁-C₆ aliphatic. In some embodiments, a provided oligonucleotide comprises one or more optionally substituted deoxyribose, wherein the 2′ position of the deoxyribose is optionally and independently substituted with —OR′, wherein each R′ is independently an optionally substituted C₁-C₆ alkyl. In some embodiments, a provided oligonucleotide comprises one or more optionally substituted deoxyribose, wherein the 2′ position of the deoxyribose is optionally and independently substituted with —OMe. In some embodiments, a provided oligonucleotide comprises one or more optionally substituted deoxyribose, wherein the 2′ position of the deoxyribose is optionally and independently substituted with —O-methoxyethyl.

[0579] In some embodiments, a provided oligonucleotide is single-stranded oligonucleotide.

[0580] In some embodiments, a provided oligonucleotide is a hybridized oligonucleotide strand. In certain embodiments, a provided oligonucleotide is a partially hydridized oligonucleotide strand. In certain embodiments, a provided oligonucleotide is a completely hydridized oligonucleotide strand. In certain embodiments, a provided oligonucleotide is a double-stranded oligonucleotide. In certain embodiments, a provided oligonucleotide is a triple-stranded oligonucleotide (e.g., a triplex).

[0581] In some embodiments, a provided oligonucleotide is chimeric. For example, in some embodiments, a provided oligonucleotide is DNA-RNA chimera, DNA-LNA chimera, etc.

[0582] In some embodiments, any one of the structures comprising an oligonucleotide depicted in WO2012/030683 can be modified in accordance with methods of the present invention to provide chirally controlled variants thereof. For example, in some embodiments the chirally controlled variants comprise a stereochemical modification at any one or more of the linkage phosphorus and/or a P-modification at any one or more of the linkage phosphorus. For example, in some embodiments, a particular nucleotide unit of a oligonucleotide of WO2012/030683 is preselected to be stereochemically modified at the linkage phosphorus of that nucleotide unit and/or P-modified at the linkage phosphorus of that nucleotide unit. In some embodiments, a chirally controlled oligonucleotide is of any one of the structures depicted in FIGS. 26-30. In some embodiments, a chirally controlled oligonucleotide is a variant (e.g., modified version) of any one of the structures depicted in FIGS. 26-30. The disclosure of WO2012/030683 is herein incorporated by reference in its entirety.

[0583] In some embodiments, a provided oligonucleotide is a therapeutic agent.

[0584] In some embodiments, a provided oligonucleotide is an antisense oligonucleotide.

[0585] In some embodiments, a provided oligonucleotide is an antigene oligonucleotide.

[0586] In some embodiments, a provided oligonucleotide is a decoy oligonucleotide.

[0587] In some embodiments, a provided oligonucleotide is part of a DNA vaccine.

[0588] In some embodiments, a provided oligonucleotide is an immunomodulatory oligonucleotide, e.g., immunostimulatory oligonucleotide and immunoinhibitory oligonucleotide.

[0589] In some embodiments, a provided oligonucleotide is an adjuvant.

[0590] In some embodiments, a provided oligonucleotide is an aptamer.

[0591] In some embodiments, a provided oligonucleotide is a ribozyme.

[0592] In some embodiments, a provided oligonucleotide is a deoxyribozyme (DNAzymes or DNA enzymes).

[0593] In some embodiments, a provided oligonucleotide is an siRNA.

[0594] In some embodiments, a provided oligonucleotide is a microRNA, or miRNA.

[0595] In some embodiments, a provided oligonucleotide is a ncRNA (non-coding RNAs), including a long non-coding RNA (lncRNA) and a small non-coding RNA, such as piwi-interacting RNA (piRNA).

[0596] In some embodiments, a provided oligonucleotide is complementary to a structural RNA, e.g., tRNA.

[0597] In some embodiments, a provided oligonucleotide is a nucleic acid analog, e.g., GNA, LNA, PNA, TNA and Morpholino.

[0598] In some embodiments, a provided oligonucleotide is a P-modified prodrug.

[0599] In some embodiments, a provided oligonucleotide is a primer. In some embodiments, a primers is for use in polymerase-based chain reactions (i.e., PCR) to amplify nucleic acids. In some embodiments, a primer is for use in any known variations of PCR, such as reverse transcription PCR (RT-PCR) and real-time PCR.

[0600] In some embodiments, a provided oligonucleotide is characterized as having the ability to modulate RNase H activation. For example, in some embodiments, RNase H activation is modulated by the presence of stereocontrolled phosphorothioate nucleic acid analogs, with natural DNA/RNA being more or equally susceptible than the Rp stereoisomer, which in turn is more susceptible than the corresponding Sp stereoisomer.

[0601] In some embodiments, a provided oligonucleotide is characterized as having the ability to indirectly or directly increase or decrease activity of a protein or inhibition or promotion of the expression of a protein. In some embodiments, a provided oligonucleotide is characterized in that it is useful in the control of cell proliferation, viral replication, and/or any other cell signaling process.

[0602] In some embodiments, a provided oligonucleotide is from about 2 to about 200 nucleotide units in length. In some embodiments, a provided oligonucleotide is from about 2 to about 180 nucleotide units in length. In some embodiments, a provided oligonucleotide is from about 2 to about 160 nucleotide units in length. In some embodiments, a provided oligonucleotide is from about 2 to about 140 nucleotide units in length. In some embodiments, a provided oligonucleotide is from about 2 to about 120 nucleotide units in length. In some embodiments, a provided oligonucleotide is from about 2 to about 100 nucleotide units in length. In some embodiments, a provided oligonucleotide is from about 2 to about 90 nucleotide units in length. In some embodiments, a provided oligonucleotide is from about 2 to about 80 nucleotide units in length. In some embodiments, a provided oligonucleotide is from about 2 to about 70 nucleotide units in length. In some embodiments, a provided oligonucleotide is from about 2 to about 60 nucleotide units in length. In some embodiments, a provided oligonucleotide is from about 2 to about 50 nucleotide units in length. In some embodiments, a provided oligonucleotide is from about 2 to about 40 nucleotide units in length. In some embodiments, a provided oligonucleotide is from about 2 to about 30 nucleotide units in length. In some embodiments, a provided oligonucleotide is from about 2 to about 29 nucleotide units in length. In some embodiments, a provided oligonucleotide is from about 2 to about 28 nucleotide units in length. In some embodiments, a provided oligonucleotide is from about 2 to about 27 nucleotide units in length. In some embodiments, a provided oligonucleotide is from about 2 to about 26 nucleotide units in length. In some embodiments, a provided oligonucleotide is from about 2 to about 25 nucleotide units in length. In some embodiments, a provided oligonucleotide is from about 2 to about 24 nucleotide units in length. In some embodiments, a provided oligonucleotide is from about 2 to about 23 nucleotide units in length. In some embodiments, a provided oligonucleotide is from about 2 to about 22 nucleotide units in length. In some embodiments, a provided oligonucleotide is from about 2 to about 21 nucleotide units in length. In some embodiments, a provided oligonucleotide is from about 2 to about 20 nucleotide units in length.

[0603] In some embodiments, a provided oligonucleotide is from about 4 to about 200 nucleotide units in length. In some embodiments, a provided oligonucleotide is from about 4 to about 180 nucleotide units in length. In some embodiments, a provided oligonucleotide is from about 4 to about 160 nucleotide units in length. In some embodiments, a provided oligonucleotide is from about 4 to about 140 nucleotide units in length. In some embodiments, a provided oligonucleotide is from about 4 to about 120 nucleotide units in length. In some embodiments, a provided oligonucleotide is from about 4 to about 100 nucleotide units in length. In some embodiments, a provided oligonucleotide is from about 4 to about 90 nucleotide units in length. In some embodiments, a provided oligonucleotide is from about 4 to about 80 nucleotide units in length. In some embodiments, a provided oligonucleotide is from about 4 to about 70 nucleotide units in length. In some embodiments, a provided oligonucleotide is from about 4 to about 60 nucleotide units in length. In some embodiments, a provided oligonucleotide is from about 4 to about 50 nucleotide units in length. In some embodiments, a provided oligonucleotide is from about 4 to about 40 nucleotide units in length. In some embodiments, a provided oligonucleotide is from about 4 to about 30 nucleotide units in length. In some embodiments, a provided oligonucleotide is from about 4 to about 29 nucleotide units in length. In some embodiments, a provided oligonucleotide is from about 4 to about 28 nucleotide units in length. In some embodiments, a provided oligonucleotide is from about 4 to about 27 nucleotide units in length. In some embodiments, a provided oligonucleotide is from about 4 to about 26 nucleotide units in length. In some embodiments, a provided oligonucleotide is from about 4 to about 25 nucleotide units in length. In some embodiments, a provided oligonucleotide is from about 4 to about 24 nucleotide units in length. In some embodiments, a provided oligonucleotide is from about 4 to about 23 nucleotide units in length. In some embodiments, a provided oligonucleotide is from about 4 to about 22 nucleotide units in length. In some embodiments, a provided oligonucleotide is from about 4 to about 21 nucleotide units in length. In some embodiments, a provided oligonucleotide is from about 4 to about 20 nucleotide units in length.

[0604] In some embodiments, a provided oligonucleotide is from about 5 to about 10 nucleotide units in length. In some embodiments, a provided oligonucleotide is from about 10 to about 30 nucleotide units in length. In some embodiments, a provided oligonucleotide is from about 15 to about 25 nucleotide units in length. In some embodiments, a provided oligonucleotide is from about 5, 6, 7, 8, 9, 10, 11, 12, 13, 14, 15, 16, 17, 18, 19, 20, 21, 22, 23, 24, or 25 nucleotide units in length.

[0605] In some embodiments, the oligonucleotide is at least 2 nucleotide units in length. In some embodiments, the oligonucleotide is at least 3 nucleotide units in length. In some embodiments, the oligonucleotide is at least 4 nucleotide units in length. In some embodiments, the oligonucleotide is at least 5 nucleotide units in length. In some embodiments, the oligonucleotide is at least 6 nucleotide units in length. In some embodiments, the oligonucleotide is at least 7 nucleotide units in length. In some embodiments, the oligonucleotide is at least 8 nucleotide units in length. In some embodiments, the oligonucleotide is at least 9 nucleotide units in length. In some embodiments, the oligonucleotide is at least 10 nucleotide units in length. In some embodiments, the oligonucleotide is at least 11 nucleotide units in length. In some embodiments, the oligonucleotide is at least 12 nucleotide units in length. In some embodiments, the oligonucleotide is at least 15 nucleotide units in length. In some embodiments, the oligonucleotide is at least 20 nucleotide units in length. In some embodiments, the oligonucleotide is at least 25 nucleotide units in length. In some other embodiments, the oligonucleotide is at least 30 nucleotide units in length. In some other embodiments, the oligonucleotide is a duplex of complementary strands of at least 18 nucleotide units in length. In some other embodiments, the oligonucleotide is a duplex of complementary strands of at least 21 nucleotide units in length.

[0606] In some embodiments, the 5′-end and/or the 3′-end of a provided oligonucleotide is modified. In some embodiments, the 5′-end and/or the 3′-end of a provided oligonucleotide is modified with a terminal cap moiety. Exemplary such modifications, including terminal cap moieties are extensively described herein and in the art, for example but not limited to those described in US Patent Application Publication US 2009/0023675A1.

### Species of Oligonucleotides

[0607] In certain embodiments, an oligonucleotide of formula I is of any one of the structures shown in Table 2, above and those described in the examples.

[0608] In some embodiments, a provided chirally controlled oligonucleotide comprises the sequence of, or part of the sequence of mipomersen. Mipomersen is based on the following base sequence GCCT/UCAGT/UCT/UGCT/UT/UCGCACC (SEQ ID NO: 112). In some embodiments, one or more of any of the nucleotide or linkages may be modified in accordance of the present invention. In some embodiments, the present invention provides a chirally controlled oligonucleotide having the sequence of G*-C*-C*-U*-C*-dA-dG-dT-dC-dT-dG-dmC-dT-dT-dmC-G*-C*-A*-C*-C* (SEQ ID NO: 113) [d=2′-deoxy,*=2′-O-(2-methoxyethyl)] with 3′-5′ phosphorothioate linkages. Exemplary modified mipomersen sequences are described throughout the application, including but not limited to those in Table 4.

[0609] In certain embodiments, a provided oligonucleotide is a mipomersen unimer. In certain embodiments, a provided oligonucleotide is a mipomersen unimer of configuration Rp. In certain embodiments, a provided oligonucleotide is a mipomersen unimer of configuration Sp.

[0610] Exemplary chirally controlled oligonucleotides comprising the sequence of, or part of the sequence of mipomersen is depicted in Table 4, below.

TABLE 4
Exemplary Mipomersen related sequences.

| | SEQ | | De- |
|---|---|---|---|
| | ID | | scrip- |
| Oligo | NO: | Stereochemistry/Sequence | tion |
| 101 | 106 | All-(Rp)-d[GsCsCsTsCsAsGsTsCsTsGsCsTsTsCsGsCsAsCsC] | All-R |
| 102 | 106 | All-(Sp)-d[GsCsCsTsCsAsGsTsCsTsGsCsTsTsCsGsCsAsCsC] | All-S |
| 103 | 106 | (Rp, Rp, Rp, Rp, Rp, Sp, Sp, Sp, Sp, Sp Sp, Sp, Sp, Sp, Rp, Rp, Rp, Rp, | 5R-9S- |
| | | Rp)-d[GsCsCsTsCsAsGsTsCsTsGsCsTsTsCsGsCsAsCsC] | 5R |
| 104 | 106 | (Sp, Sp, Sp, Sp, Sp, Rp, Rp, Rp, Rp, Rp Rp, Rp, Rp, Rp, Sp, Sp, Sp, Sp, | 5S-9R- |
| | | Sp)-d[GsCsCsTsCsAsGsTsCsTsGsCsTsTsCsGsCsAsCsC] | 5S |
| 105 | 106 | (Sp, Rp, Rp, Rp, Rp, Rp, Rp, Rp, Rp, Rp Rp, Rp, Rp, Rp, Rp, Rp, Rp, | 1S-17R- |
| | | Rp, Sp)-d[GsCsCsTsCsAsGsTsCsTsGsCsTsTsCsGsCsAsCsC] | 1S |
| 106 | 106 | (Rp, Sp, Sp, Sp, Sp, Sp, Sp, Sp, Sp, Sp Sp, Sp, Sp, Sp, Sp, Sp, Sp, Sp, | 1R-17S- |
| | | Rp)-d[GsCsCsTsCsAsGsTsCsTsGsCsTsTsCsGsCsAsCsC] | 1R |
| 107 | 106 | (Rp, Sp, Rp, Sp, Rp, Sp, Rp, Sp, Rp, Sp Rp, Sp, Rp, Sp, Rp, Sp, Rp, Sp, | (R/S)₉R |
| | | Rp)-d[GsCsCsTsCsAsGsTsCsTsGsCsTsTsCsGsCsAsCsC] | |
| 108 | 106 | (Sp, Rp, Sp, Rp, Sp, Rp, Sp, Rp, Sp, Rp Sp, Rp, Sp, Rp, Sp, Rp, Sp, Rp, | (S/R)₉S |
| | | Sp)-d[GsCsCsTsCsAsGsTsCsTsGsCsTsTsCsGsCsAsCsC] | |
| 109 | 106 | (Sp, Sp, Sp, Rp, Rp, Rp, Rp, Rp, Rp, Rp Rp, Rp, Rp, Rp, Rp, Rp, Sp, Sp, | 3S-13R- |
| | | Sp)d[GsCsCsTsCsAsGsTsCsTsGsCsTsTsCsGsCsAsCsC] | 3S |
| 110 | 106 | (Rp, Rp, Rp, Sp, Sp, Sp, Sp, Sp, Sp, Sp Sp, Sp, Sp, Sp, Sp, Sp, Rp, Rp, | 3R-13S- |
| | | Rp)-d[GsCsCsTsCsAsGsTsCsTsGsCsTsTsCsGsCsAsCsC] | 3R |
| 111 | 106 | (Sp, Sp, Sp, Sp, Sp, Sp, Sp, Sp, Sp, Sp Sp, Sp, Sp, Sp, Sp, Sp, Sp, Sp, | 18S/R¹⁹ |
| | | Rp)-d[GsCsCsTsCsAsGsTsCsTsGsCsTsTsCsGsCsAsCsC] | |
| 112 | 106 | (Sp, Sp, Sp, Sp, Sp, Sp, Sp, Sp, Rp, Sp Sp, Sp, Sp, Sp, Sp, Sp, Sp, Sp, | 18S/R⁹ |
| | | Sp)-d[GsCsCsTsCsAsGsTsCsTsGsCsTsTsCsGsCsAsCsC] | |
| 113 | 106 | (Sp, Rp, Sp, Sp, Sp, Sp, Sp, Sp, Sp, Sp Sp, Sp, Sp, Sp, Sp, Sp, Sp, Sp, | 18S/R² |
| | | Sp)-d[GsCsCsTsCsAsGsTsCsTsGsCsTsTsCsGsCsAsCsC] | |
| 114 | 106 | (Rp, Rp, Sp, Rp, Rp, Sp, Rp, Rp, Sp, Rp Rp, Sp, Rp, Rp, Sp, Rp, Rp, Sp, | (RRS)₆- |
| | | Rp)-d[GsCsCsTsCsAsGsTsCsTsGsCsTsTsCsGsCsAsCsC] | R |
| 115 | 106 | (Sp, Rp, Rp, Sp, Rp, Rp, Sp, Rp, Rp, Sp, Rp Rp, Sp, Rp, Rp, Sp, Rp, Rp, | S-(RRS)₆ |
| | | Sp)-d[GsCsCsTsCsAsGsTsCsTsGsCsTsTsCsGsCsAsCsC] | |
| 116 | 106 | (Rp, Sp, Rp, Rp, Sp, Rp, Rp, Sp, Rp Rp, Sp, Rp, Rp, Sp, Rp, Rp, Sp, Rp | RS- |
| | | Rp)d[GsCsCsTsCsAsGsTsCsTsGsCsTsTsCsGsCsAsCsC] | (RRS)₅- |
| | | | RR |
| 122 | 106 | All-(Rp)- | All-R |
| | | d[Gs1Cs1Cs1Ts1Cs1As1Gs1Ts1Cs1Ts1Gs1Cs1Ts1Ts1Cs1Gs1Cs1As1Cs1C] | |
| 123 | 106 | (Sp, Rp, Rp, Rp, Rp, Rp, Rp, Rp, Rp, Rp Rp, Rp, Rp, Rp, Rp, Rp, Rp, | 1S-17R- |
| | | Rp, Sp)-d[Gs1Cs1Cs1Ts1Cs1As1Gs1Ts1Cs1Ts1Gs1Cs1Ts1Ts1Cs1Gs1Cs1As1Cs1C] | 1S |
| 124 | 106 | All-(Sp)-d[Gs1Cs1Cs1Ts1Cs1As1Gs1Ts1Cs1Ts1Gs1Cs1Ts1Ts1Cs1Gs1Cs1As1Cs1C] | All-S |
| 126 | | All-(Rp)-d[Cs2As2Gs2T] | All-R |
| 127 | | All-(Rp)-d[Cs3As3Gs3T] | All-R |
| 128 | | All-(Sp)-d[Cs4As4Gs4T] | All-S |
| 129 | | All-(Sp)-d[Cs5As5Gs5T] | All-S |
| 130 | | All-(Sp)-d[Cs6As6Gs6T] | All-S |
| 131 | 106 | All-(Rp)-d[Gs7Cs7Cs7Ts7Cs7As7Gs7Ts7Cs7Ts7Gs7Cs7Ts7Ts7Cs7Gs7Cs7As7Cs7C] | All-R |
| 132 | 106 | All-(Sp)-d[Gs7Cs7Cs7Ts7Cs7As7Gs7Ts7Cs7Ts7Gs7Cs7Ts7Ts7Cs7Gs7Cs7As7Cs7C] | All-S |
| 133 | 106 | (Rp, Rp, Rp, Rp, Rp, Sp, Sp, Sp, Sp, Sp Sp, Sp, Sp, Sp, Rp, Rp, Rp, Rp, | 5R-9S- |
| | | Rp)-d[Gs15mCs15mCs1Ts15mCs1As1Gs1Ts15mCs1Ts1 | 5R |
| | | Gs15mCs1Ts1Ts15mCs1Gs15mCs1As15mCs15mC] | |
| 134 | 106 | (Sp, Sp, Sp, Sp, Sp, Rp, Rp, Rp, Rp, Rp Rp, Rp, Rp, Rp, Sp, Sp, Sp, Sp, | 5S-9R- |
| | | Sp)-d[Gs15mCs15mCs1Ts15mCs1As1Gs1Ts15mCs1Ts1 | 5S |
| | | Gs15mCs1Ts1Ts15mCs1Gs15mCs1As15mCs15mC] | |
| 135 | 108 | All-(Rp)-d[5mCs1As1Gs1Ts15mCs1Ts1Gs15mCs1Ts1Ts15mCs1G] | All-R |
| 136 | 108 | All-(Sp)-d[5mCs1As1Gs1Ts15mCs1Ts1Gs15mCs1Ts1Ts15mCs1G] | All-S |
| 137 | 108 | (Sp, Rp, Rp, Rp, Rp, Rp, Rp, Rp, Rp, Rp, Sp)- | 1S-9R- |
| | | d[5mCs1As1Gs1Ts15mCs1Ts1Gs15mCs1Ts1Ts15mCs1G] | 1S |
| 138 | 108 | (Sp, Sp, Rp, Rp, Rp, Rp, Rp, Rp, Rp, Sp, Sp)- | 2S-7R- |
| | | d[5mCs1As1Gs1Ts15mCs1Ts1Gs15mCs1Ts1Ts15mCs1G] | 2S |
| 139 | 108 | (Rp, Sp, Sp, Sp, Sp, Sp, Sp, Sp, Sp, Sp, Rp)- | 1R-9S- |
| | | d[5mCs1As1Gs1Ts15mCs1Ts1Gs15mCs1Ts1Ts15mCs1G] | 1R |
| 140 | 108 | (Rp, Rp, Sp, Sp, Sp, Sp, Sp, Sp, Sp, Rp, Rp)- | 2R-7S- |
| | | d[5mCs1As1Gs1Ts15mCs1Ts1Gs15mCs1Ts1Ts15mCs1G] | 2R |
| 141 | 108 | (Sp, Sp, Sp, Rp, Rp, Rp, Rp, Rp, Sp, Sp, Sp)- | 3S-5R- |
| | | d[5mCs1As1Gs1Ts15mCs1Ts1Gs15mCs1Ts1Ts15mCs1G] | 3S |
| 142 | 108 | (Rp, Rp, Rp, Sp, Sp, Sp, Sp, Sp, Rp, Rp, Rp)- | 3R-5S- |
| | | d[5mCs1As1Gs1Ts15mCs1Ts1Gs15mCs1Ts1Ts15mCs1G] | 3R |
| 143 | 108 | (Sp, Sp, Rp, Sp, Sp, Rp, Sp, Sp, Rp, Sp, Sp)- | (SSR)₃- |
| | | d[5mCs1As1Gs1Ts15mCs1Ts1Gs15mCs1Ts1Ts15mCs1G] | SS |
| 144 | 108 | (Rp, Rp, Sp, Rp, Rp, Sp, Rp, Rp, Sp, Rp, Rp)- | (RRS)₃- |
| | | d[5mCs1As1Gs1Ts15mCs1Ts1Gs15mCs1Ts1Ts15mCs1G] | RR |
| 145 | 109 | All-(Rp)- | All-R |
| | | d[5mCs1Ts15mCs1As1Gs1Ts15mCs1Ts1Gs15mCs1Ts1Ts15mCs1 | |
| | | Gs15mC] | |
| 146 | | All-(Rp)-d[Gs15mCs1Ts1G] | All-R |
| 147 | | All-(Rp)-d[5mCs1As1Gs1T] | All-R |
| 148 | 108 | All-(Rp)-d[5mCs2As2Gs2Ts25mCs2Ts2Gs25mCs2Ts2Ts25mCs2G] | All-R |
| 149 | 108 | All-(Rp)-d[5mCs4As4Gs4Ts45mCs4Ts4Gs45mCs4Ts4Ts45mCs4G] | All-R |
| 151 | | All-(Sp)-d[Cs1AsGs1T] | All-S |
| 152 | | All-(Sp)-d[Cs1AGs1T] | All-S |
| 153 | | All-(Sp)-d[CAs1GsT] | All-S |
| 157 | | All-(Sp)-d[5mCs1As1Gs1T] | All-S |
| 158 | 106 | (Sp, Sp, Sp, Sp, Sp, Rp, Rp, Rp, Rp, Rp Rp, Rp, Rp, Rp, Sp, Sp, Sp, Sp)- | 5S-9R- |
| | | d[GsCsCsTsCsAsGsTsCsTsGsCsTsTsCs1GsCsACsC] | 4S |
| 159 | 106 | (Sp, Sp, Sp, Sp, Sp, Rp, Rp, Rp, Rp, Rp Rp, Rp, Rp, Rp, Sp, Sp, Sp, Sp, | 5S-9R- |
| | | Sp)-d[Gs1Cs1Cs1Ts1CsAsGsTsCsTsGsCsTsTsCs1GsCs2As2Cs2C] | 5S |
| 160 | 106 | All-(Rp)- | All-R |
| | | (Gs5mCs5mCsTs5mCs)_{MOE}d[AsGsTs5mCsTsGs5mCsTsTs5mCs] | |
| | | (Gs5mCsAs5mCs5mC)_{MOE} | |
| 161 | 106 | All-(Sp)- | All-S |
| | | (Gs5mCs5mCsTs5mCs)_{MOE}d[AsGsTs5mCsTsGs5mCsTsTs5mCs] | |
| | | (Gs5mCsAs5mCs5mC)_{MOE} | |
| 162 | 106 | (Rp, Rp, Rp, Rp, Rp, Sp, Sp, Sp, Sp, Sp Sp, Sp, Sp, Sp, Rp, Rp, Rp, Rp, | 5R-9S- |
| | | Rp)-(Gs5mCs5mCsTs5mCs)_{MOE}d[AsGsTs5mCsTsGs5mCsTsTs5mCs] | 5R |
| | | (Gs5mCsAs5mCs5mC)_{MOE} | |
| 163 | 106 | (Sp, Sp, Sp, Sp, Sp, Rp, Rp, Rp, Rp, Rp Rp, Rp, Rp, Rp, Sp, Sp, Sp, Sp, | 5S-9R- |
| | | Sp)-(Gs5mCs5mCsTs5mCs)_{MOE}d[AsGsTs5mCsTsGs5mCsTsTs5mCs] | 5S |
| | | (Gs5mCsAs5mCs5mC)_{MOE} | |
| 164 | 106 | (Sp, Rp, Rp, Rp, Rp, Rp, Rp, Rp, Rp, Rp Rp, Rp, Rp, Rp, Rp, Rp, Rp, | 1S-17R- |
| | | Rp, Sp)- | 1S |
| | | (Gs5mCs5mCsTs5mCs)_{MOE}d[AsGsTs5mCsTsGs5mCsTsTs5mCs] | |
| | | (Gs5mCsAs5mCs5mC)_{MOE} | |
| 165 | 106 | (Rp, Sp, Sp, Sp, Sp, Sp, Sp, Sp, Sp, Sp Sp, Sp, Sp, Sp, Sp, Sp, Sp, Sp, | 1R-17S- |
| | | Rp)-(Gs5mCs5mCsTs5mCs)_{MOE}d[AsGsTs5mCsTsGs5mCsTsTs5mCs] | 1R |
| | | (Gs5mCsAs5mCs5mC)_{MOE} | |
| 166 | 106 | (Rp, Sp, Rp, Sp, Rp, Sp, Rp, Sp, Rp, Sp Rp, Sp, Rp, Sp, Rp, Sp, Rp, Sp, | (R/S)₉R |
| | | Rp)-(Gs5mCs5mCsTs5mCs)_{MOE}d[AsGsTs5mCsTsGs5mCsTsTs5mCs] | |
| | | (Gs5mCsAs5mCs5mC)_{MOE} | |
| 167 | 106 | (Sp, Rp, Sp, Rp, Sp, Rp, Sp, Rp, Sp, Rp Sp, Rp, Sp, Rp, Sp, Rp, Sp, Rp, | (S/R)₉S |
| | | Sp)-(Gs5mCs5mCsTs5mCs)_{MOE}d[AsGsTs5mCsTsGs5mCsTsTs5mCs] | |
| | | (Gs5mCsAs5mCs5mC)_{MOE} | |
| 168 | 106 | (Sp, Sp, Sp, Rp, Rp, Rp, Rp, Rp, Rp, Rp Rp, Rp, Rp, Rp, Rp, Rp, Sp, Sp, | 3S-13R- |
| | | Sp)(Gs5mCs5mCsTs5mCs)_{MOE}d[AsGsTs5mCsTsGs5mCsTsTs5mCs] | 3S |
| | | (Gs5mCsAs5mCs5mC)_{MOE} | |
| 169 | 106 | (Rp, Rp, Rp, Sp, Sp, Sp, Sp, Sp, Sp, Sp Sp, Sp, Sp, Sp, Sp, Sp, Rp, Rp, | 3R-13S- |
| | | Rp)-(Gs5mCs5mCsTs5mCs)_{MOE}d[AsGsTs5mCsTsGs5mCsTsTs5mCs] | 3R |
| | | (Gs5mCsAs5mCs5mC)_{MOE} | |
| 170 | 106 | (Sp, Sp, Sp, Sp, Sp, Sp, Sp, Sp, Sp, Sp Sp, Sp, Sp, Sp, Sp, Sp, Sp, Sp, | 18S/R¹⁹ |
| | | Rp)-(Gs5mCs5mCsTs5mCs)_{MOE}d[AsGsTs5mCsTsGs5mCsTsTs5mCs] | |
| | | (Gs5mCsAs5mCs5mC)_{MOE} | |
| 171 | 106 | (Sp, Sp, Sp, Sp, Sp, Sp, Sp, Sp, Rp, Sp Sp, Sp, Sp, Sp, Sp, Sp, Sp, Sp, | 18S/R⁹ |
| | | Sp)-(Gs5mCs5mCsTs5mCs)_{MOE}d[AsGsTs5mCsTsGs5mCsTsTs5mCs] | |
| | | (Gs5mCsAs5mCs5mC)_{MOE} | |
| 172 | 106 | (Sp, Rp, Sp, Sp, Sp, Sp, Sp, Sp, Sp, Sp Sp, Sp, Sp, Sp, Sp, Sp, Sp, Sp, | 18S/R² |
| | | Sp)-(Gs5mCs5mCsTs5mCs)_{MOE}d[AsGsTs5mCsTsGs5mCsTsTs5mCs] | |
| | | (Gs5mCsAs5mCs5mC)_{MOE} | |
| 173 | 106 | (Rp, Rp, Sp, Rp, Rp, Sp, Rp, Rp, Sp, Rp Rp, Sp, Rp, Rp, Sp, Rp, Rp, Sp, | (RRS)₆-R |
| | | Rp)-(Gs5mCs5mCsTs5mCs)_{MOE}d[AsGsTs5mCsTsGs5mCsTsTs5mCs] | |
| | | (Gs5mCsAs5mCs5mC)_{MOE} | |
| 174 | 106 | (Sp, Rp, Rp, Sp, Rp, Rp, Sp, Rp, Rp, Sp, Rp Rp, Sp, Rp, Rp, Sp, Rp, Rp, | S-(RRS)₆ |
| | | Sp)-(Gs5mCs5mCsTs5mCs)_{MOE}d[AsGsTs5mCsTsGs5mCsTsTs5mCs] | |
| | | (Gs5mCsAs5mCs5mC)_{MOE} | |
| 175 | 106 | (Rp, Sp, Rp, Rp, Sp, Rp, Rp, Sp, Rp Rp, Sp, Rp, Rp, Sp, Rp, Rp, Sp, Rp | RS- |
| | | Rp)(Gs5mCs5mCsTs5mCs)_{MOE}d[AsGsTs5mCsTsGs5mCsTsTs5mCs] | (RRS)₅- |
| | | (Gs5mCsAs5mCs5mC)_{MOE} | RR |
| 176 | 106 | (Rp, Sp, Rp, Rp, Sp, Rp, Rp, Sp, Rp Rp, Sp, Rp, Rp, Sp, Rp, Rp, Sp, Rp | RS- |
| | | Rp)(Gs15mCs15mCs1Ts15mCs1)_{MOE}d[As1Gs1Ts15mCs1Ts1Gs15m | (RRS)₅- |
| | | Cs1Ts1Ts15mCs1] (Gs15mCs1As15mCs15mC)_{MOE} | RR |
| 177 | 106 | (Rp, Sp, Rp, Rp, Sp, Rp, Rp, Sp, Rp Rp, Sp, Rp, Rp, Sp, Rp, Rp, Sp, Rp | RS- |
| | | Rp)(Gs15mCs15mCs1Ts15mCs1)_{MOE}d[AGT5mCTG5mCTT5mC] | (RRS)₅- |
| | | (Gs25mCs2As25mCs25mC)_{MOE} | RR |
| 178 | 106 | (Sp, Rp, Rp, Sp, Rp, Rp, Sp, Rp, Rp, Sp, Rp Rp, Sp, Rp, Rp, Sp, Rp, Rp, | S-(RRS)₆ |
| | | Sp)-(Gs5mCs5mCsTs5mCs)_{MOE}d[AsGsTs5mCsTsGs5mCsTsTs5mCs] | |
| | | (Gs5mCsAs5mCs5mC)_{F} (F: 2-fluorodeoxyribose) | |
| 179 | 106 | (Rp, Sp, Rp, Rp, Sp, Rp, Rp, Sp, Rp Rp, Sp, Rp, Rp, Sp, Rp, Rp, Sp, Rp | RS- |
| | | Rp)d[Gs8Cs8Cs8Ts8Cs8As8Gs8Ts8Cs8Ts8Gs8Cs8Ts8Ts8Cs8Gs8Cs | (RRS)₅- |
| | | 8As8Cs8C] | RR |
| 180 | 106 | (Rp, Sp, Rp, Rp, Sp, Rp, Rp, Sp, Rp Rp, Sp, Rp, Rp, Sp, Rp, Rp, Sp, Rp | RS- |
| | | Rp)d[Gs9Cs9Cs9Ts9Cs9As9Gs9Ts9Cs9Ts9Gs9Cs9Ts9Ts9Cs9Gs9Cs | (RRS)₅- |
| | | 9As9Cs9C] | RR |
| 181 | 106 | (Rp, Sp, Rp, Rp, Sp, Rp, Rp, Sp, Rp Rp, Sp, Rp, Rp, Sp, Rp, Rp, Sp, Rp | RS- |
| | | Rp)d[Gs10Cs10Cs10Ts10Cs10As10Gs10Ts10Cs10Ts10Gs10Cs10Ts10 | (RRS)₅- |
| | | Ts10Cs10Gs10Cs10As10Cs10C] | RR |
| 182 | 106 | (Rp, Sp, Rp, Rp, Sp, Rp, Rp, Sp, Rp Rp, Sp, Rp, Rp, Sp, Rp, Rp, Sp, Rp | RS- |
| | | Rp)d[Gs11Cs11Cs11Ts11Cs11As11Gs11Ts11Cs11Ts11Gs11Cs11Ts11 | (RRS)₅- |
| | | Ts11Cs11Gs11Cs11As11Cs11C] | RR |
| 183 | 106 | (Rp, Sp, Rp, Rp, Sp, Rp, Rp, Sp, Rp Rp, Sp, Rp, Rp, Sp, Rp, Rp, Sp, Rp | RS- |
| | | Rp)d[Gs12Cs12Cs12Ts12Cs12As12Gs12Ts12Cs12Ts12Gs12Cs12Ts12 | (RRS)₅- |
| | | Ts12Cs12Gs12Cs12As12Cs12C] | RR |
| 184 | 106 | (Rp, Sp, Rp, Rp, Sp, Rp, Rp, Sp, Rp Rp, Sp, Rp, Rp, Sp, Rp, Rp, Sp, Rp | RS- |
| | | Rp)d[Gs13Cs13Cs13Ts13Cs13As13Gs13Ts13Cs13Ts13Gs13Cs13Ts13 | (RRS)₅- |
| | | Ts13Cs13Gs13Cs13As13Cs13C] | RR |
| 185 | 106 | (Rp, Sp, Rp, Rp, Sp, Rp, Rp, Sp, Rp Rp, Sp, Rp, Rp, Sp, Rp, Rp, Sp, Rp | RS- |
| | | Rp)d[Gs14Cs14Cs14Ts14Cs14As14Gs14Ts14Cs14Ts14Gs14Cs14Ts14 | (RRS)₅- |
| | | Ts14Cs14Gs14Cs14As14Cs14C] | RR |
| 186 | 106 | (Rp, Sp, Rp, Rp, Sp, Rp, Rp, Sp, Rp Rp, Sp, Rp, Rp, Sp, Rp, Rp, Sp, Rp | RS- |
| | | Rp)d[Gs15Cs15Cs15Ts15Cs15As15Gs15Ts15Cs15Ts15Gs15Cs15Ts15 | (RRS)₅- |
| | | Ts15Cs15Gs15Cs15As15Cs15C] | RR |
| 187 | 110 | (Rp, Sp, Rp, Rp, Sp, Rp, Rp, Sp, Rp Rp, Sp, Rp, Rp, Sp, Rp, Rp, Sp, Rp | RS- |
| | | Rp)d[GsCsCs1TsCsAs]GsUs2CsUsGsd[CsTs3TsCsGs]CsAs4CsC | (RRS)₅- |
| | | | RR |
| 188 | 106 | (Sp, Sp, Sp, Sp, Sp, Rp, Rp, Rp, Rp, Rp Rp, Rp, Rp, Rp, Sp, Sp, Sp, Sp)- | 5S-9R- |
| | | d[GsCsCsTsCsAsGsTsCsTsGsCsTsTsCsGsCsACsC] | 4S |
| 189 | 106 | (Sp, Sp, Sp, Sp, Sp, Rp, Rp, Rp, Rp, Rp Rp, Rp, Rp, Rp, Sp, Sp, Sp, Sp)- | 5S-9R- |
| | | d[Gs1Cs1Cs1Ts1Cs1As1Gs1Ts1Cs1Ts1Gs1Cs1Ts1Ts1Cs1Gs1CsACs | 4S |
| | | 1C] | |
| 190 | 106 | (Sp, Sp, Sp, Sp, Sp, Rp, Rp, Rp, Rp, Rp Rp, Rp, Rp, Rp, Sp, Sp, Sp, Sp)- | 5S-9R- |
| | | d[Gs8Cs8Cs8Ts8Cs8As8Gs8Ts8Cs8Ts8Gs8Cs8Ts8Ts8Cs8Gs8Cs1A | 4S |
| | | Cs8C] | |
| 191 | 106 | (Sp, Sp, Sp, Sp, Sp, Rp, Rp, Rp, Rp, Rp Rp, Rp, Rp, Rp, Sp, Sp, Sp, Sp)- | 5S-9R- |
| | | d[Gs9Cs9Cs9Ts9Cs9As9Gs9Ts9Cs9Ts9Gs9Cs9Ts9Ts9Cs9Gs9Cs1A | 4S |
| | | Cs9C] | |
| 192 | 106 | (Sp, Sp, Sp, Sp, Sp, Rp, Rp, Rp, Rp, Rp Rp, Rp, Rp, Rp, Sp, Sp, Sp, Sp)- | 5S-9R- |
| | | d[Gs10Cs10Cs10Ts10Cs10As10Gs10Ts10Cs10Ts10Gs10Cs10Ts10Ts | 4S |
| | | 10Cs10Gs10Cs1ACs10C] | |
| 193 | 106 | (Sp, Sp, Sp, Sp, Sp, Rp, Rp, Rp, Rp, Rp Rp, Rp, Rp, Rp, Sp, Sp, Sp, Sp)- | 5S-9R- |
| | | d[Gs11Cs11Cs11Ts11Cs11As11Gs11Ts11Cs11Ts11Gs11Cs11Ts11Ts | 4S |
| | | 11Cs11Gs11Cs1ACs11C] | |
| 194 | 106 | (Sp, Sp, Sp, Sp, Sp, Rp, Rp, Rp, Rp, Rp Rp, Rp, Rp, Rp, Sp, Sp, Sp, Sp)- | 5S-9R- |
| | | d[Gs12Cs12Cs12Ts12Cs12As12Gs12Ts12Cs12Ts12Gs12Cs12Ts12Ts | 4S |
| | | 12Cs12Gs12Cs1ACs12C] | |
| 195 | 106 | (Sp, Sp, Sp, Sp, Sp, Rp, Rp, Rp, Rp, Rp Rp, Rp, Rp, Rp, Sp, Sp, Sp, Sp)- | 5S-9R- |
| | | d[Gs13Cs13Cs13Ts13Cs13As13Gs13Ts13Cs13Ts13Gs13Cs13Ts13Ts | 4S |
| | | 13Cs13Gs13Cs1ACs13C] | |
| 196 | 106 | (Sp, Sp, Sp, Sp, Sp, Rp, Rp, Rp, Rp, Rp Rp, Rp, Rp, Rp, Sp, Sp, Sp, Sp)- | 5S-9R- |
| | | d[Gs14Cs14Cs14Ts14Cs14As14Gs14Ts14Cs14Ts14Gs14Cs14Ts14Ts | 4S |
| | | 14Cs14Gs14Cs1ACs14C] | |
| 197 | 106 | (Sp, Sp, Sp, Sp, Sp, Rp, Rp, Rp, Rp, Rp Rp, Rp, Rp, Rp, Sp, Sp, Sp, Sp)- | 5S-9R- |
| | | d[Gs15Cs15Cs15Ts15Cs15As15Gs15Ts15Cs15Ts15Gs15Cs15Ts15Ts | 4S |
| | | 15Cs15Gs15Cs1ACs15C] | |
| 198 | 111 | (Sp, Sp, Sp, Sp, Sp, Rp, Rp, Rp, Rp, Rp Rp, Rp, Rp, Rp, Sp, Sp, Sp, Sp)- | 5S-9R- |
| | | GsCsCsUsCsAsGsUsCsUsGsCsUsUsCsGsCsACsC | 4S |
| 199 | 111 | (Sp, Sp, Sp, Sp, Sp, Rp, Rp, Rp, Rp, Rp Rp, Rp, Rp, Rp, Sp, Sp, Sp, Sp)- | 5S-9R- |
| | | Gs1Cs1Cs1Us1Cs1As1Gs1Us1Cs1Us1Gs1Cs1Us1Us1Cs1Gs1CsACs | 4S |
| | | 1C | |
| 200 | 111 | (Sp, Sp, Sp, Sp, Sp, Rp, Rp, Rp, Rp, Rp Rp, Rp, Rp, Rp, Sp, Sp, Sp, Sp)- | 5S-9R- |
| | | Gs8Cs8Cs8Us8Cs8As8Gs8Us8Cs8Us8Gs8Cs8Us8Us8Cs8Gs8Cs1AC | 4S |
| | | s8C | |
| 201 | 111 | (Sp, Sp, Sp, Sp, Sp, Rp, Rp, Rp, Rp, Rp Rp, Rp, Rp, Rp, Sp, Sp, Sp, Sp)- | 5S-9R- |
| | | Gs9Cs9Cs9Us9Cs9As9Gs9Us9Cs9Us9Gs9Cs9Us9Us9Cs9Gs9Cs1AC | 4S |
| | | s9C | |
| 202 | 111 | (Sp, Sp, Sp, Sp, Sp, Rp, Rp, Rp, Rp, Rp Rp, Rp, Rp, Rp, Sp, Sp, Sp, Sp)- | 5S-9R- |
| | | Gs10Cs10Cs10Us10Cs10As10Gs10Us10Cs10Us10Gs10Cs10Us10Us | 4S |
| | | 10Cs10Gs10Cs1ACs10C | |
| 203 | 111 | (Sp, Sp, Sp, Sp, Sp, Rp, Rp, Rp, Rp, Rp Rp, Rp, Rp, Rp, Sp, Sp, Sp, Sp)- | 5S-9R- |
| | | Gs11Cs11Cs11Us11Cs11As11Gs11Us11Cs11Us11Gs11Cs11Us11Us | 4S |
| | | 11Cs11Gs11Cs1ACs11C | |
| 204 | 111 | (Sp, Sp, Sp, Sp, Sp, Rp, Rp, Rp, Rp, Rp Rp, Rp, Rp, Rp, Sp, Sp, Sp, Sp)- | 5S-9R- |
| | | Gs12Cs12Cs12Us12Cs12As12Gs12Us12Cs12Us12Gs12Cs12Us12Us | 4S |
| | | 12Cs12Gs12Cs1ACs12C | |
| 205 | 111 | (Sp, Sp, Sp, Sp, Sp, Rp, Rp, Rp, Rp, Rp Rp, Rp, Rp, Rp, Sp, Sp, Sp, Sp)- | 5S-9R- |
| | | Gs13Cs13Cs13Us13Cs13As13Gs13Us13Cs13Us13Gs13Cs13Us13Us | 4S |
| | | 13Cs13Gs13Cs1ACs13C | |
| 206 | 111 | (Sp, Sp, Sp, Sp, Sp, Rp, Rp, Rp, Rp, Rp Rp, Rp, Rp, Rp, Sp, Sp, Sp, Sp)- | 5S-9R- |
| | | Gs14Cs14Cs14Us14Cs14As14Gs14Us14Cs14Us14Gs14Cs14Us14Us | 4S |
| | | 14Cs14Gs14Cs1ACs14C | |
| 207 | 111 | (Sp, Sp, Sp, Sp, Sp, Rp, Rp, Rp, Rp, Rp Rp, Rp, Rp, Rp, Sp, Sp, Sp, Sp)- | 5S-9R- |
| | | Gs15Cs15Cs15Us15Cs15As15Gs15Us15Cs15Us15Gs15Cs15Us15Us | 4S |
| | | 15Cs15Gs15Cs1ACs15C | |

### Oligonucleotide Compositions

[0611] The present invention provides compositions comprising or consisting of a plurality of provided oligonucleotides (e.g., chirally controlled oligonucleotide compositions). In some embodiments, all such provided oligonucleotides are of the same type, i.e., all have the same base sequence, pattern of backbone linkages (i.e., pattern of internucleotidic linkage types, for example, phosphate, phosphorothioate, etc), pattern of backbone chiral centers (i.e. pattern of linkage phosphorus stereochemistry (Rp/Sp)), and pattern of backbone phosphorus modifications (e.g., pattern of “-XLR¹” groups in formula I). In many embodiments, however, provided compositions comprise a plurality of oligonucleotides types, typically in pre-determined relative amounts.

[0612] In some embodiments, a provided chirally controlled oligonucleotide composition is a chirally pure mipomersen composition. That is to say, in some embodiments, a provided chirally controlled oligonucleotide composition provides mipomersen as a single diastereomer with respect to the configuration of the linkage phosphorus.

[0613] In some embodiments, a provided chirally controlled oligonucleotide composition is a chirally uniform mipomersen composition. That is to say, in some embodiments, every linkage phosphorus of mipomersen is in the Rp configuration or every linkage phosphorus of mipomersen is in the Sp configuration.

[0614] In some embodiments, a provided chirally controlled oligonucleotide composition comprises a combination of one or more provided oligonucleotide types. One of skill in the chemical and medicinal arts will recognize that the selection and amount of each of the one or more types of provided oligonucleotides in a provided composition will depend on the intended use of that composition. That is to say, one of skill in the relevant arts would design a provided chirally controlled oligonucleotide composition such that the amounts and types of provided oligonucleotides contained therein cause the composition as a whole to have certain desirable characteristics (e.g., biologically desirable, therapeutically desirable, etc.).

[0615] In some embodiments, a provided chirally controlled oligonucleotide composition comprises a combination of two or more provided oligonucleotide types. In some embodiments, a provided chirally controlled oligonucleotide composition comprises a combination of three or more provided oligonucleotide types. In some embodiments, a provided chirally controlled oligonucleotide composition comprises a combination of four or more provided oligonucleotide types. In some embodiments, a provided chirally controlled oligonucleotide composition comprises a combination of five or more provided oligonucleotide types. In some embodiments, a provided chirally controlled oligonucleotide composition comprises a combination of six or more provided oligonucleotide types. In some embodiments, a provided chirally controlled oligonucleotide composition comprises a combination of seven or more provided oligonucleotide types. In some embodiments, a provided chirally controlled oligonucleotide composition comprises a combination of eight or more provided oligonucleotide types. In some embodiments, a provided chirally controlled oligonucleotide composition comprises a combination of nine or more provided oligonucleotide types. In some embodiments, a provided chirally controlled oligonucleotide composition comprises a combination of ten or more provided oligonucleotide types. In some embodiments, a provided chirally controlled oligonucleotide composition comprises a combination of fifteen or more provided oligonucleotide types.

[0616] In some embodiments, a provided chirally controlled oligonucleotide composition is a combination of an amount of chirally uniform mipomersen of the Rp configuration and an amount of chirally uniform mipomersen of the Sp configuration.

[0617] In some embodiments, a provided chirally controlled oligonucleotide composition is a combination of an amount of chirally uniform mipomersen of the Rp configuration, an amount of chirally uniform mipomersen of the Sp configuration, and an amount of one or more chirally pure mipomersen of a desired diastereomeric form.

### Methods for Making Chirally Controlled Oligonucleotides and Compositions Thereof

[0618] The present invention provides methods for making chirally controlled oligonucleotides and chirally controlled compositions comprising one or more specific nucleotide types. As noted above, the phrase “oligonucleotide type,” as used herein, defines an oligonucleotide that has a particular base sequence, pattern of backbone linkages, pattern of backbone chiral centers, and pattern of backbone phosphorus modifications (e.g., “—XLR¹” groups). Oligonucleotides of a common designated “type” are structurally identical to one another with respect to base sequence, pattern of backbone linkages, pattern of backbone chiral centers, and pattern of backbone phosphorus modifications.

[0619] In some embodiments, a provided chirally controlled oligonucleotide in the invention has properties different from those of the corresponding stereorandom oligonucleotide mixture. In some embodiments, a chirally controlled oligonucleotide has lipophilicity different from that of the stereorandom oligonucleotide mixture. In some embodiments, a chirally controlled oligonucleotide has different retention time on HPLC. In some embodiments, a chirally controlled oligonucleotide may have a peak retention time significantly different from that of the corresponding stereorandom oligonucleotide mixture. During oligonucleotide purification using HPLC as generally practiced in the art, certain chirally controlled oligonucleotides will be largely if not totally lost. During oligonucleotide purification using HPLC as generally practiced in the art, certain chirally controlled oligonucleotides will be largely if not totally lost. One of the consequences is that certain diastereomers of a stereorandom oligonucleotide mixture (certain chirally controlled oligonucleotides) are not tested in assays. Another consequence is that from batches to batches, due to the inevitable instrumental and human errors, the supposedly “pure” stereorandom oligonucleotide will have inconsistent compositions in that diastereomers in the composition, and their relative and absolute amounts, are different from batches to batches. The chirally controlled oligonucleotide and chirally controlled oligonucleotide composition provided in this invention overcome such problems, as a chirally controlled oligonucleotide is synthesized in a chirally controlled fashion as a single diastereomer, and a chirally controlled oligonucleotide composition comprise predetermined levels of one or more individual oligonucleotide types.

[0620] One of skill in the chemical and synthetic arts will appreciate that synthetic methods of the present invention provide for a degree of control during each step of the synthesis of a provided oligonucleotide such that each nucleotide unit of the oligonucleotide can be designed and/or selected in advance to have a particular stereochemistry at the linkage phosphorus and/or a particular modification at the linkage phosphorus, and/or a particular base, and/or a particular sugar. In some embodiments, a provided oligonucleotide is designed and/or selected in advance to have a particular combination of stereocenters at the linkage phosphorus of the internucleotidic linkage.

[0621] In some embodiments, a provided oligonucleotide made using methods of the present invention is designed and/or determined to have a particular combination of linkage phosphorus modifications. In some embodiments, a provided oligonucleotide made using methods of the present invention is designed and/or determined to have a particular combination of bases. In some embodiments, a provided oligonucleotide made using methods of the present invention is designed and/or determined to have a particular combination of sugars. In some embodiments, a provided oligonucleotide made using methods of the present invention is designed and/or determined to have a particular combination of one or more of the above structural characteristics.

[0622] Methods of the present invention exhibit a high degree of chiral control. For instance, methods of the present invention facilitate control of the stereochemical configuration of every single linkage phosphorus within a provided oligonucleotide. In some embodiments, methods of the present invention provide an oligonucleotide comprising one or more modified internucleotidic linkages independently having the structure of formula I.

[0623] In some embodiments, methods of the present invention provide an oligonucleotide which is a mipomersen unimer. In some embodiments, methods of the present invention provide an oligonucleotide which is a mipomersen unimer of configuration Rp. In some embodiments, methods of the present invention provide an oligonucleotide which is a mipomersen unimer of configuration Sp.

[0624] In some embodiments, methods of the present invention provide a chirally controlled oligonucleotide composition, i.e., an oligonucleotide composition that contains predetermined levels of individual oligonucleotide types. In some embodiments a chirally controlled oligonucleotide composition comprises one oligonucleotide type. In some embodiments, a chirally controlled oligonucleotide composition comprises more than one oligonucleotide type. In some embodiments, a chirally controlled oligonucleotide composition comprises a plurality of oligonucleotide types. Exemplary chirally controlled oligonucleotide compositions made in accordance with the present invention are described herein.

[0625] In some embodiments, methods of the present invention provide chirally pure mipomersen compositions with respect to the configuration of the linkage phosphorus. That is to say, in some embodiments, methods of the present invention provide compositions of mipomersen wherein mipomersen exists in the composition in the form of a single diastereomer with respect to the configuration of the linkage phosphorus.

[0626] In some embodiments, methods of the present invention provide chirally uniform mipomersen compositions with respect to the configuration of the linkage phosphorus. That is to say, in some embodiments, methods of the present invention provide compositions of mipomersen in which all nucleotide units therein have the same stereochemistry with respect to the configuration of the linkage phosphorus, e.g., all nucleotide units are of the Rp configuration at the linkage phosphorus or all nucleotide units are of the Sp configuration at the linkage phosphorus.

[0627] In some embodiments, a provided chirally controlled oligonucleotide is over 50% pure. In some embodiments, a provided chirally controlled oligonucleotide is over about 55% pure. In some embodiments, a provided chirally controlled oligonucleotide is over about 60% pure. In some embodiments, a provided chirally controlled oligonucleotide is over about 65% pure. In some embodiments, a provided chirally controlled oligonucleotide is over about 70% pure. In some embodiments, a provided chirally controlled oligonucleotide is over about 75% pure. In some embodiments, a provided chirally controlled oligonucleotide is over about 80% pure. In some embodiments, a provided chirally controlled oligonucleotide is over about 85% pure. In some embodiments, a provided chirally controlled oligonucleotide is over about 90% pure. In some embodiments, a provided chirally controlled oligonucleotide is over about 91% pure. In some embodiments, a provided chirally controlled oligonucleotide is over about 92% pure. In some embodiments, a provided chirally controlled oligonucleotide is over about 93% pure. In some embodiments, a provided chirally controlled oligonucleotide is over about 94% pure. In some embodiments, a provided chirally controlled oligonucleotide is over about 95% pure. In some embodiments, a provided chirally controlled oligonucleotide is over about 96% pure. In some embodiments, a provided chirally controlled oligonucleotide is over about 97% pure. In some embodiments, a provided chirally controlled oligonucleotide is over about 98% pure. In some embodiments, a provided chirally controlled oligonucleotide is over about 99% pure. In some embodiments, a provided chirally controlled oligonucleotide is over about 99.5% pure. In some embodiments, a provided chirally controlled oligonucleotide is over about 99.6% pure. In some embodiments, a provided chirally controlled oligonucleotide is over about 99.7% pure. In some embodiments, a provided chirally controlled oligonucleotide is over about 99.8% pure. In some embodiments, a provided chirally controlled oligonucleotide is over about 99.9% pure. In some embodiments, a provided chirally controlled oligonucleotide is over at least about 99% pure.

[0628] In some embodiments, a chirally controlled oligonucleotide composition is a composition designed to comprise a single oligonucleotide type. In certain embodiments, such compositions are about 50% diastereomerically pure. In some embodiments, such compositions are about 50% diastereomerically pure. In some embodiments, such compositions are about 50% diastereomerically pure. In some embodiments, such compositions are about 55% diastereomerically pure. In some embodiments, such compositions are about 60% diastereomerically pure. In some embodiments, such compositions are about 65% diastereomerically pure. In some embodiments, such compositions are about 70% diastereomerically pure. In some embodiments, such compositions are about 75% diastereomerically pure. In some embodiments, such compositions are about 80% diastereomerically pure. In some embodiments, such compositions are about 85% diastereomerically pure. In some embodiments, such compositions are about 90% diastereomerically pure. In some embodiments, such compositions are about 91% diastereomerically pure. In some embodiments, such compositions are about 92% diastereomerically pure. In some embodiments, such compositions are about 93% diastereomerically pure. In some embodiments, such compositions are about 94% diastereomerically pure. In some embodiments, such compositions are about 95% diastereomerically pure. In some embodiments, such compositions are about 96% diastereomerically pure. In some embodiments, such compositions are about 97% diastereomerically pure. In some embodiments, such compositions are about 98% diastereomerically pure. In some embodiments, such compositions are about 99% diastereomerically pure. In some embodiments, such compositions are about 99.5% diastereomerically pure. In some embodiments, such compositions are about 99.6% diastereomerically pure. In some embodiments, such compositions are about 99.7% diastereomerically pure. In some embodiments, such compositions are about 99.8% diastereomerically pure. In some embodiments, such compositions are about 99.9% diastereomerically pure. In some embodiments, such compositions are at least about 99% diastereomerically pure.

[0629] In some embodiments, a chirally controlled oligonucleotide composition is a composition designed to comprise multiple oligonucleotide types. In some embodiments, methods of the present invention allow for the generation of a library of chirally controlled oligonucleotides such that a pre-selected amount of any one or more chirally controlled oligonucleotide types can be mixed with any one or more other chirally controlled oligonucleotide types to create a chirally controlled oligonucleotide composition. In some embodiments, the pre-selected amount of an oligonucleotide type is a composition having any one of the above-described diastereomeric purities.

[0630] In some embodiments, the present invention provides methods for making a chirally controlled oligonucleotide comprising steps of:
[0631] (1) coupling;
[0632] (2) capping;
[0633] (3) modifying;
[0634] (4) deblocking; and
[0635] (5) repeating steps (1)-(4) until a desired length is achieved.

[0636] When describing the provided methods, the word “cycle” has its ordinary meaning as understood by a person of ordinary skill in the art. In some embodiments, one round of steps (1)-(4) is referred to as a cycle.

[0637] In some embodiments, the present invention provides methods for making chirally controlled oligonucleotide compositions, comprising steps of:
[0638] (a) providing an amount of a first chirally controlled oligonucleotide; and
[0639] (b) optionally providing an amount of one or more additional chirally controlled oligonucleotides.

[0640] In some embodiments, a first chirally controlled oligonucleotide is an oligonucleotide type, as described herein. In some embodiments, a one or more additional chirally controlled oligonucleotide is a one or more oligonucleotide type, as described herein.

[0641] One of skill in the relevant chemical and synthetic arts will recognize the degree of versatility and control over structural variation and stereochemical configuration of a provided oligonucleotide when synthesized using methods of the present invention. For instance, after a first cycle is complete, a subsequent cycle can be performed using a nucleotide unit individually selected for that subsequent cycle which, in some embodiments, comprises a nucleobase and/or a sugar that is different from the first cycle nucleobase and/or sugar. Likewise, the chiral auxiliary used in the coupling step of the subsequent cycle can be different from the chiral auxiliary used in the first cycle, such that the second cycle generates a phosphorus linkage of a different stereochemical configuration. In some embodiments, the stereochemistry of the linkage phosphorus in the newly formed internucleotidic linkage is controlled by using stereochemically pure phosphoramidites. Additionally, the modification reagent used in the modifying step of a subsequent cycle can be different from the modification reagent used in the first or former cycle. The cumulative effect of this iterative assembly approach is such that each component of a provided oligonucleotide can be structurally and configurationally tailored to a high degree. An additional advantage to this approach is that the step of capping minimizes the formation of “n−1” impurities that would otherwise make isolation of a provided oligonucleotide extremely challenging, and especially oligonucleotides of longer lengths.

[0642] In some embodiments, an exemplary cycle of the method for making chirally controlled oligonucleotides is illustrated in Scheme I. In Scheme I, [symbol] represents the solid support, and optionally a portion of the growing chirally controlled oligonucleotide attached to the solid support. The chiral auxiliary exemplified has the structure of formula 3-I:

[chemical structure]

which is further described below. “Cap” is any chemical moiety introduced to the nitrogen atom by the capping step, and in some embodiments, is an amino protecting group. One of ordinary skill in the art understands that in the first cycle, there may be only one nucleoside attached to the solid support when started, and cycle exit can be performed optionally before deblocking. As understood by a person of skill in the art, B^{PRO} is a protected base used in oligonucleotide synthesis. Each step of the above-depicted cycle of Scheme I is described further below.

[chemical structure]

### Synthesis on Solid Support

[0643] In some embodiments, the synthesis of a provided oligonucleotide is performed on solid phase. In some embodiments, reactive groups present on a solid support are protected. In some embodiments, reactive groups present on a solid support are unprotected. During oligonucleotide synthesis a solid support is treated with various reagents in several synthesis cycles to achieve the stepwise elongation of a growing oligonucleotide chain with individual nucleotide units. The nucleoside unit at the end of the chain which is directly linked to the solid support is termed “the first nucleoside” as used herein. A first nucleoside is bound to a solid support via a linker moiety, i.e. a diradical with covalent bonds between either of a CPG, a polymer or other solid support and a nucleoside. The linker stays intact during the synthesis cycles performed to assemble the oligonucleotide chain and is cleaved after the chain assembly to liberate the oligonucleotide from the support.

[0644] Solid supports for solid-phase nucleic acid synthesis include the supports described in, e.g., U.S. Pat. Nos. 4,659,774, 5,141,813, 4,458,066; Caruthers U.S. Pat. Nos. 4,415,732, 4,458,066, 4,500,707, 4,668,777, 4,973,679, and 5,132,418; Andrus et al. U.S. Pat. Nos. 5,047,524, 5,262,530; and Koster U.S. Pat. No. 4,725,677 (reissued as Re34,069). In some embodiments, a solid phase is an organic polymer support. In some embodiments, a solid phase is an inorganic polymer support. In some embodiments, an organic polymer support is polystyrene, aminomethyl polystyrene, a polyethylene glycol-polystyrene graft copolymer, polyacrylamide, polymethacrylate, polyvinylalcohol, highly cross-linked polymer (HCP), or other synthetic polymers, carbohydrates such as cellulose and starch or other polymeric carbohydrates, or other organic polymers and any copolymers, composite materials or combination of the above inorganic or organic materials. In some embodiments, an inorganic polymer support is silica, alumina, controlled polyglass (CPG), which is a silica-gel support, or aminopropyl CPG. Other useful solid supports include fluorous solid supports (see e.g., WO/2005/070859), long chain alkylamine (LCAA) controlled pore glass (CPG) solid supports (see e.g., S. P. Adams, K. S. Kavka, E. J. Wykes, S. B. Holder and G. R. Galluppi, J. Am. Chem. Soc., 1983, 105, 661-663; G. R. Gough, M. J. Bruden and P. T. Gilham, Tetrahedron Lett., 1981, 22, 4177-4180). Membrane supports and polymeric membranes (see e.g. Innovation and Perspectives in Solid Phase Synthesis, Peptides, Proteins and Nucleic Acids, ch 21 pp 157-162, 1994, Ed. Roger Epton and U.S. Pat. No. 4,923,901) are also useful for the synthesis of nucleic acids. Once formed, a membrane can be chemically functionalized for use in nucleic acid synthesis. In addition to the attachment of a functional group to the membrane, the use of a linker or spacer group attached to the membrane is also used in some embodiments to minimize steric hindrance between the membrane and the synthesized chain.

[0645] Other suitable solid supports include those generally known in the art to be suitable for use in solid phase methodologies, including, for example, glass sold as Primer™ 200 support, controlled pore glass (CPG), oxalyl-controlled pore glass (see, e.g., Alul, et al., Nucleic Acids Research, 1991, 19, 1527), TentaGel Support—an aminopolyethyleneglycol derivatized support (see, e.g., Wright, et al., Tetrahedron Lett., 1993, 34, 3373), and Poros-a copolymer of polystyrene/divinylbenzene.

[0646] Surface activated polymers have been demonstrated for use in synthesis of natural and modified nucleic acids and proteins on several solid supports mediums. A solid support material can be any polymer suitably uniform in porosity, having sufficient amine content, and sufficient flexibility to undergo any attendant manipulations without losing integrity. Examples of suitable selected materials include nylon, polypropylene, polyester, polytetrafluoroethylene, polystyrene, polycarbonate, and nitrocellulose. Other materials can serve as a solid support, depending on the design of the investigator. In consideration of some designs, for example, a coated metal, in particular gold or platinum can be selected (see e.g., US publication No. 20010055761). In one embodiment of oligonucleotide synthesis, for example, a nucleoside is anchored to a solid support which is functionalized with hydroxyl or amino residues. Alternatively, a solid support is derivatized to provide an acid labile trialkoxytrityl group, such as a trimethoxytrityl group (TMT). Without being bound by theory, it is expected that the presence of a trialkoxytrityl protecting group will permit initial detritylation under conditions commonly used on DNA synthesizers. For a faster release of oligonucleotide material in solution with aqueous ammonia, a diglycoate linker is optionally introduced onto the support.

[0647] In some embodiments, a provided oligonucleotide alternatively is synthesized from the 5′ to 3′ direction. In some embodiments, a nucleic acid is attached to a solid support through its 5′ end of the growing nucleic acid, thereby presenting its 3′ group for reaction, i.e. using 5′-nucleoside phosphoramidites or in enzymatic reaction (e.g. ligation and polymerization using nucleoside 5′-triphosphates). When considering the 5′ to 3′ synthesis the iterative steps of the present invention remain unchanged (i.e. capping and modification on the chiral phosphorus).

### Linking Moiety

[0648] A linking moiety or linker is optionally used to connect a solid support to a compound comprising a free nucleophilic moiety. Suitable linkers are known such as short molecules which serve to connect a solid support to functional groups (e.g., hydroxyl groups) of initial nucleosides molecules in solid phase synthetic techniques. In some embodiments, the linking moiety is a succinamic acid linker, or a succinate linker (—CO—CH₂—CH₂—CO—), or an oxalyl linker (—CO—CO—). In some embodiments, the linking moiety and the nucleoside are bonded together through an ester bond. In some embodiments, a linking moiety and a nucleoside are bonded together through an amide bond. In some embodiments, a linking moiety connects a nucleoside to another nucleotide or nucleic acid. Suitable linkers are disclosed in, for example, Oligonucleotides And Analogues A Practical Approach, Ekstein, F. Ed., IRL Press, N.Y., 1991, Chapter 1 and Solid-Phase Supports for Oligonucleotide Synthesis, Pon, R. T., Curr. Prot. Nucleic Acid Chem., 2000, 3.1.1-3.1.28.

[0649] A linker moiety is used to connect a compound comprising a free nucleophilic moiety to another nucleoside, nucleotide, or nucleic acid. In some embodiments, a linking moiety is a phosphodiester linkage. In some embodiments, a linking moiety is an H-phosphonate moiety. In some embodiments, a linking moiety is a modified phosphorus linkage as described herein. In some embodiments, a universal linker (UnyLinker) is used to attached the oligonucleotide to the solid support (Ravikumar et al., Org. Process Res. Dev., 2008, 12 (3), 399-410). In some embodiments, other universal linkers are used (Pon, R. T., Curr. Prot. Nucleic Acid Chem., 2000, 3.1.1-3.1.28). In some embodiments, various orthogonal linkers (such as disulfide linkers) are used (Pon, R. T., Curr. Prot. Nucleic Acid Chem., 2000, 3.1.1-3.1.28).

### General Conditions—Solvents for Synthesis

[0650] Syntheses of provided oligonucleotides are generally performed in aprotic organic solvents. In some embodiments, a solvent is a nitrile solvent such as, e.g., acetonitrile. In some embodiments, a solvent is a basic amine solvent such as, e.g., pyridine. In some embodiments, a solvent is an ethereal solvent such as, e.g., tetrahydrofuran. In some embodiments, a solvent is a halogenated hydrocarbon such as, e.g., dichloromethane. In some embodiments, a mixture of solvents is used. In certain embodiments a solvent is a mixture of any one or more of the above-described classes of solvents.

[0651] In some embodiments, when an aprotic organic solvent is not basic, a base is present in the reacting step. In some embodiments where a base is present, the base is an amine base such as, e.g., pyridine, quinoline, or N,N-dimethylaniline. Exemplary other amine bases include pyrrolidine, piperidine, N-methyl pyrrolidine, pyridine, quinoline, N,N-dimethylaminopyridine (DMAP), or N,N-dimethylaniline.

[0652] In some embodiments, a base is other than an amine base.

[0653] In some embodiments, an aprotic organic solvent is anhydrous. In some embodiments, an anhydrous aprotic organic solvent is freshly distilled. In some embodiments, a freshly distilled anhydrous aprotic organic solvent is a basic amine solvent such as, e.g., pyridine. In some embodiments, a freshly distilled anhydrous aprotic organic solvent is an ethereal solvent such as, e.g., tetrahydrofuran. In some embodiments, a freshly distilled anhydrous aprotic organic solvent is a nitrile solvent such as, e.g., acetonitrile.

### Chiral Reagent

[0654] In provided methods, chiral reagents are used to confer stereoselectivity in the production of chirally controlled oligonucleotides. Many different chiral reagents, also referred to by those of skill in the art and herein as chiral auxiliaries, may be used in accordance with methods of the present invention. Exemplary such chiral reagents are described herein and in Wada I, II and III, referenced above. In certain embodiments, a chiral reagent is as described by Wada I. In some embodiments, a chiral reagent for use in accordance with the methods of the present invention are of Formula 3-I, below:

[chemical structure]

wherein W¹ and W² are any of —O—, —S—, or —NG⁵-, Ul and U₃ are carbon atoms which are bonded to U₂ if present, or to each other if r is 0, via a single, double or triple bond. U₂ is —C—, —CG⁸-, —CG⁸G⁸-, —NG⁸-, —N—, —O—, or —S— where r is an integer of 0 to 5 and no more than two heteroatoms are adjacent. When any one of U₂ is C, a triple bond must be formed between a second instance of U₂, which is C, or to one of Ul or U₃. Similarly, when any one of U₂ is CG⁸, a double bond is formed between a second instance of U₂ which is -CG⁸- or —N—, or to one of Ul or U₃.

[0655] In some embodiments, -U₁-(U₂)ᵣ-U₃-is -CG³G⁴-CG¹G²-. In some embodiments, -U₁-(U₂)ᵣ-U₃-is -CG³=CG¹-. In some embodiments, -U₁-(U₂)ᵣ-U₃-is —C≡C—. In some embodiments, -U₁-(U₂)ᵣ-U₃-is -CG³=CG⁸-CG¹G²-. In some embodiments, -U₁-(U₂)ᵣ-U₃-is -CG³G⁴-O-CG¹G²-. In some embodiments, -U₁-(U₂)ᵣ-U₃-is -CG³G⁴-NG⁸-CG¹G²-. In some embodiments, -U₁-(U₂)ᵣ-U₃-is -CG³G⁴-N-CG²-. In some embodiments, -U₁-(U₂)ᵣ-U₃-is -CG³G⁴-N═C G⁸-CG¹G²-.

[0656] As defined herein, G¹, G², G³, G⁴, G⁵, and G⁸ are independently hydrogen, or an optionally substituted group selected from alkyl, aralkyl, cycloalkyl, cycloalkylalkyl, heterocyclyl, heteroaryl, and aryl; or two of G¹, G², G³, G⁴, and G⁵are G⁶ taken together to form an optionally substituted, saturated, partially unsaturated or unsaturated carbocyclic or heteroatom-containing ring of up to about 20 ring atoms which is monocyclic or polycyclic, and is fused or unfused. In some embodiments, a ring so formed is substituted by oxo, thioxo, alkyl, alkenyl, alkynyl, heteroaryl, or aryl moieties. In some embodiments, when a ring formed by taking two G⁶ together is substituted, it is substituted by a moiety which is bulky enough to confer stereoselectivity during the reaction.

[0657] In some embodiments, a ring formed by taking two of G⁶ together is optionally substituted cyclopentyl, pyrrolyl, cyclopropyl, cyclohexenyl, cyclopentenyl, tetrahydropyranyl, or piperazinyl. In some embodiments, a ring formed by taking two of G⁶ together is optionally substituted cyclopentyl, pyrrolyl, cyclopropyl, cyclohexenyl, cyclopentenyl, tetrahydropyranyl, pyrrolidinyl, or piperazinyl.

[0658] In some embodiments, G¹ is optionally substituted phenyl. In some embodiments, G¹ is phenyl. In some embodiments, G² is methyl or hydrogen. In some embodiments, G¹ is optionally substituted phenyl and G² is methyl. In some embodiments, G¹ is phenyl and G² is methyl.

[0659] In some embodiments, r is 0.

[0660] In some embodiments, W¹ is —NG⁵-. In some embodiments, one of G³ and G⁴ is taken together with G⁵ to form an optionally substituted pyrrolidinyl ring. In some embodiments, one of G³ and G⁴ is taken together with G⁵ to form a pyrrolidinyl ring.

[0661] In some embodiments, W² is —O—.

[0662] In some embodiments, a chiral reagent is a compound of Formula 3-AA:

[chemical structure]

wherein each variable is independently as defined above and described herein.

[0663] In some embodiments of Formula 3AA, W¹ and W² are independently -NG⁵-, —O—, or —S—; G¹, G², G³, G⁴, and G⁵ are independently hydrogen, or an optionally substituted group selected from alkyl, aralkyl, cycloalkyl, cycloalkylalkyl, heterocyclyl, heteroaryl, or aryl; or two of G¹, G², G³, G⁴, and G⁵ are G⁶ taken together to form an optionally substituted saturated, partially unsaturated or unsaturated carbocyclic or heteroatom-containing ring of up to about 20 ring atoms which is monocyclic or polycyclic, fused or unfused, and no more than four of G, G², G³, G⁴, and G⁵ and G⁶. Similarly to the compounds of Formula 3-I, any of G¹, G², G³, G⁴, or G⁵ are optionally substituted by oxo, thioxo, alkyl, alkenyl, alkynyl, heteroaryl, or aryl moieties. In some embodiments, such substitution induces stereoselectivity in chirally controlled oligonucleotide production.

[0664] In some embodiments, a chiral reagent has one of the following formulae:

[chemical structure]

[0665] In some embodiments, a chiral reagent is an aminoalcohol. In some embodiments, a chiral reagent is an aminothiol. In some embodiments, a chiral reagent is an aminophenol. In some embodiments, a chiral reagent is (S)- and (R)-2-methylamino-1-phenylethanol, (1R,2S)-ephedrine, or (1R,2S)-2-methylamino-1,2-diphenylethanol.

[0666] In some embodiments of the invention, a chiral reagent is a compound of one of the following formulae:

[chemical structure]

[0667] The choice of chiral reagent, for example, the isomer represented by Formula Q or its stereoisomer, Formula R, permits specific control of chirality at a linkage phosphorus. Thus, either an Rp or Sp configuration can be selected in each synthetic cycle, permitting control of the overall three dimensional structure of a chirally controlled oligonucleotide. In some embodiments, a chirally controlled oligonucleotide has all Rp stereocenters. In some embodiments of the invention, a chirally controlled oligonucleotide has all Sp stereocenters. In some embodiments of the invention, each linkage phosphorus in the chirally controlled oligonucleotide is independently Rp or Sp. In some embodiments of the invention, each linkage phosphorus in the chirally controlled oligonucleotide is independently Rp or Sp, and at least one is Rp and at least one is Sp. In some embodiments, the selection of Rp and Sp centers is made to confer a specific three dimensional superstructure to a chirally controlled oligonucleotide. Exemplary such selections are described in further detail herein.

[0668] In some embodiments, a chiral reagent for use in accordance with the present invention is selected for its ability to be removed at a particular step in the above-depicted cycle. For example, in some embodiments it is desirable to remove a chiral reagent during the step of modifying the linkage phosphorus. In some embodiments, it is desirable to remove a chiral reagent before the step of modifying the linkage phosphorus. In some embodiments, it is desirable to remove a chiral reagent after the step of modifying the linkage phosphorus. In some embodiments, it is desirable to remove a chiral reagent after a first coupling step has occurred but before a second coupling step has occurred, such that a chiral reagent is not present on the growing oligonucleotide during the second coupling (and likewise for additional subsequent coupling steps). In some embodiments, a chiral reagent is removed during the “deblock” reaction that occurs after modification of the linkage phosphorus but before a subsequent cycle begins. Exemplary methods and reagents for removal are described herein.

[0669] In some embodiments, removal of chiral auxiliary is achieved when performing the modification and/or deblocking step, as illustrated in Scheme I. It can be beneficial to combine chiral auxiliary removal together with other transformations, such as modification and deblocking. A person of ordinary skill in the art would appreciate that the saved steps/transformation could improve the overall efficiency of synthesis, for instance, with respect to yield and product purity, especially for longer oligonucleotides. One example wherein the chiral auxiliary is removed during modification and/or deblocking is illustrated in Scheme I.

[0670] In some embodiments, a chiral reagent for use in accordance with methods of the present invention is characterized in that it is removable under certain conditions. For instance, in some embodiments, a chiral reagent is selected for its ability to be removed under acidic conditions. In certain embodiments, a chiral reagent is selected for its ability to be removed under mildly acidic conditions. In certain embodiments, a chiral reagent is selected for its ability to be removed by way of an E1 elimination reaction (e.g., removal occurs due to the formation of a cation intermediate on the chiral reagent under acidic conditions, causing the chiral reagent to cleave from the oligonucleotide). In some embodiments, a chiral reagent is characterized in that it has a structure recognized as being able to accommodate or facilitate an E1 elimination reaction. One of skill in the relevant arts will appreciate which structures would be envisaged as being prone toward undergoing such elimination reactions.

[0671] In some embodiments, a chiral reagent is selected for its ability to be removed with a nucleophile. In some embodiments, a chiral reagent is selected for its ability to be removed with an amine nucleophile. In some embodiments, a chiral reagent is selected for its ability to be removed with a nucleophile other than an amine.

[0672] In some embodiments, a chiral reagent is selected for its ability to be removed with a base. In some embodiments, a chiral reagent is selected for its ability to be removed with an amine. In some embodiments, a chiral reagent is selected for its ability to be removed with a base other than an amine.

### Further Embodiments of Chiral Reagents

[0673] In some embodiments, the present invention is directed to a chiral reagent that is used to synthesize chirally controlled oligonucleotides.

[0674] In some embodiments, the present invention provides chiral reagents that are stable to the coupling, capping, modifying and deblocking steps described above and herein. In some embodiments, the present invention provides chiral reagents that are stable to the modifying and deblocking steps described above and herein. In some embodiments, the present invention provides chiral reagents that are stable to the sulfurization and deblocking steps described above and herein. In some embodiments, the present invention provides chiral reagents that are stable to the oxidation step described above and herein. In some embodiments, such a chiral reagent has a structure of formula Z-I.

[0675] In some embodiments, the present invention provides chiral reagents that are removed by treatment with a base and/or a nucleophile. In some embodiments, the present invention provides chiral reagents that are removed by treatment with a base and/or a nucleophile, and are stable to the coupling, capping, modifying and deblocking steps described above and herein. In some embodiments, the present invention provides chiral reagents that are removed by treatment comprising an amine. In some embodiments, the present invention provides chiral reagents that are removed by treatment comprising an amine, and are stable to the coupling, capping, modifying and deblocking steps described above and herein. In some embodiments, the present invention provides chiral reagents that are removed by the deprotection/cleavage conditions described in this application, and are stable to the coupling, capping, modifying and deblocking steps described above and herein. In some embodiments, such a chiral reagent has a structure of formula Z-I.

[0676] In some embodiments, the chiral reagents that are stable to the coupling, capping, modifying and deblocking steps are used to synthesize chirally controlled oligonucleotides described above and herein. In some embodiments, the chiral reagents that are stable to the coupling, capping, modifying and deblocking steps are used to synthesize chirally controlled oligonucleotides described above and herein, wherein the chirally controlled oligonucleotides comprise one or more phosphate diester or phosphorothioate diester linkages. In some embodiments, the chiral reagents that are stable to the coupling, capping, modifying and deblocking steps are used to synthesize chirally controlled oligonucleotides comprising one or more phosphate diester or phosphorothioate diester linkages, and are not removed until the desired oligonucleotide lengths have been achieved. In some embodiments, the chiral reagents that are stable to the coupling, capping, modifying and deblocking steps are used to synthesize chirally controlled oligonucleotides comprising one or more phosphate diester or phosphorothioate diester linkages, and are not removed until after cycle exit. In some embodiments, the chiral reagents that are stable to the coupling, capping, modifying and deblocking steps are used to synthesize chirally controlled oligonucleotides comprising one or more phosphate diester or phosphorothioate diester linkages, and are not removed until cleavage from solid support. In some embodiments, the chiral reagents that are stable to the coupling, capping, modifying and deblocking steps are used to synthesize chirally controlled oligonucleotides comprising one or more phosphate diester or phosphorothioate diester linkages, and are not removed until cleavage from solid support, and the removal is performed in the same step as cleavage from solid support. In some embodiments, such a chiral reagent has a structure of formula Z-I.

[0677] In some embodiments, when a chiral reagent that is stable to the coupling, capping, modifying and deblocking steps is used in oligonucleotide synthesis, the oligonucleotide with 5′-OH ready for coupling can be from any synthetic cycle, including those described in Schemes I, I-b, I-c, I-d, Z-1 and Z-2. In some embodiments, the oligonucleotide with 5′-OH for coupling comprises various types of internucleotidic linkages as described above and herein. After coupling, the modifying step as described in this application installs the desired modification to the linkage phosphorus. The product can either go to cycle exit before/after deblocking, or enter the next cycle after deblocking the 5′-OH. It is understood by a person of ordinary skill in the art that the next cycle can be any of the synthetic cycles described in this application, including but not limited to those in Schemes I, I-b, I-c, I-d, Z-1 and Z-2.

[0678] In some embodiments, a chiral reagent or a salt thereof for use in accordance with the present invention is of chemical formula (Z-I).

[chemical structure]

[0679] In the formula (Z-I), G^{z1} and G^{z2} are independently a hydrogen atom, a nitro group (—NO₂), a halogen atom, a cyano group (—CN), a group of formula (Z-II) or (Z-III), or both G¹ and G² taken together to form a group of formula (Z-IV).

[0680] In some embodiments, a group of formula (Z-II) is as depicted below:

[chemical structure]

wherein G²¹ to G²³ are independently a hydrogen atom, a nitro group, a halogen atom, a cyano group or C₁₋₃ alkyl group.

[0681] In some embodiments, a group of formula (Z-III) is as depicted below:

[chemical structure]

wherein G³¹ to G³³ are independently C₁₋₄ alkyl group, C₆₋₁₄ aryl group C₁₋₄ alkoxy group, C₇-14 aralkyl group, C₁₋₄ alkyl C₆₋₁₄ aryl group, C₁₋₄ alkoxy C₆₋₁₄ aryl group, or C₆₋₁₄ aryl C₁₋₄ alkyl group.

[0682] In some embodiments, a group of formula (Z-IV) is as depicted below:

[chemical structure]

wherein G⁴¹ to G⁴⁶ are independently a hydrogen atom, a nitro group, a halogen atom, a cyano group or C₁₋₃ alkyl group.

[0683] G^{z3} and G^{z4} are independently a hydrogen atom, C₁₋₃ alkyl group, C₆₋₁₄ aryl group, or both G^{z3} and G^{z4} taken together to form a heteroatom-containing ring that has 3 to 16 carbon atoms, together with the NH moiety in formula (Z-I).

[0684] In some embodiments, a chiral reagent has following chemical formula (Z-I′):

[chemical structure]

wherein G^{z1} and G^{z2} are same as above. Namely, G^{z1} and G^{z2} are independently a hydrogen atom, a nitro group, a halogen atom, a cyano group, a group of formula (Z-II) or (Z-III), or both G^{z1} and G^{z2} taken together to form a group of formula (Z-IV).

[0685] In certain embodiments, a chiral reagent has chemical formula (Z-I′) and each of G^{z1} and G^{z2} is a group of formula (Z-II), wherein G²¹ to G²³ are independently a hydrogen atom, a nitro group, a halogen atom, a cyano group or C₁₋₃ alkyl group.

[0686] In certain embodiments, a chiral reagent has chemical formula (Z-I′) and each of G^{z1} and G^{z2} is a group of formula (Z-II) and each of G²¹ to G²³ is a hydrogen atom.

[0687] In certain embodiments, a chiral reagent has chemical formula (Z-I′) and G^{z1} is a hydrogen atom, G^{z2} is a group of formula (Z-II), and G²¹ to G²³ are independently a hydrogen atom, a nitro group, a halogen atom, a cyano group or C₁₋₃ alkyl group.

[0688] In certain embodiments, a chiral reagent has chemical formula (Z-I′) and G^{z1} is a hydrogen atom, G^{z2} is a group of formula (Z-II), each of G²¹ and G²² is a hydrogen atom and G²³ is a nitro group.

[0689] In certain embodiments, a chiral reagent has chemical formula (Z-I′) and G^{z1} is a hydrogen atom and G^{z2} is a group of formula (III), and G³¹ to G³³ are independently C₁₋₄ alkyl group, C₆₋₁₄ aryl group, C₇-14 aralkyl group, C₁₋₄ alkyl C₆₋₁₄ aryl group, C₁₋₄ alkoxy C₆₋₁₄ aryl group, or C₆₋₁₄ aryl C₁₋₄ alkyl group.

[0690] In some embodiments, the chiral reagent has chemical formula (I′) and G¹ is a hydrogen atom and G² is a group of formula (III), and G³¹ to G³³ are independently C₁₋₄ alkyl group, C₆ aryl group, C₇₋₁₀ aralkyl group, C₁₋₄ alkyl C₆ aryl group, C₁₋₄ alkoxy C₆ aryl group, or C₆ aryl C₁₋₄ alkyl group.

[0691] In certain embodiments, a chiral reagent has chemical formula (Z-I′) and G^{z1} is a hydrogen atom, G^{z2} is a group of formula (Z-III), and G³¹ to G³³ are independently C₁₋₄ alkyl group or C₆ aryl group. Examples of C₁₋₄ alkyl group are methyl group, ethyl group, n-propyl group, iso-propyl group, n-buthyl group and tert-buthyl group.

[0692] In certain embodiments, a chiral reagent has chemical formula (Z-I′) and G^{z1} is a hydrogen atom, G^{z2} is a group of formula (Z-III), and G³¹ to G³³ are independently C₁₋₄ alkyl group.

[0693] In certain embodiments, a chiral reagent has chemical formula (Z-I′) and G^{z1} is a hydrogen atom, G^{z2} is a group of formula (Z-III), and G³¹ and G³³ are C₆ aryl group and G³² is C₁₋₄ alkyl group.

[0694] In certain embodiments, a chiral reagent has chemical formula (Z-I′) and G^{z1} and G^{z2} are taken together to form a group of formula (Z-IV), and G⁴¹ to G⁴⁶ are independently a hydrogen atom, a nitro group, a halogen atom, a cyano group or C.-4 alkyl group.

[0695] In certain embodiments, a chiral reagent has chemical formula (Z-I′) and G^{z1} and G^{z2} are taken together to form a group of formula (Z-IV), wherein each of G⁴¹ to G⁴⁶ is a hydrogen atom.

[0696] In certain embodiments, a chiral reagent is selected from one of chemical formulae 3a, 3b, 5a, Z-5b, 7a, 7b, 9a, 9b, 11a and 11b:

[chemical structure]

[chemical structure]

[0697] In some embodiments, a nucleoside 3′-phosphoramidite derivative for use in accordance with the present invention is represented by formula (Z-Va) or (Z-Vb):

[chemical structure]

wherein G^{z1} to G^{z4} are the same as above, G^{z5} is a protective group of the hydroxyl group, and Bs is a group selected from the groups represented by following formula (Z-VI) to (Z-XI), or derivatives thereof.

[chemical structure]

Examples of Bs are an adenine, a thymine, a cytosine, a guanine, an uracil, a 5-methylcytosine or derivative thereof;
[0698] R^{z2} is independently hydrogen, —OH, —SH, —NR^{d}R^{d}, —N₃, halogen, alkyl, alkenyl, alkynyl, alkyl-Y¹—, alkenyl-Y¹-, alkynyl-Y¹-, aryl-Y¹-, heteroaryl-Y¹-, —OR^{b}, or —SR^{b}, wherein R^{b} is a blocking moiety;
[0699] Y¹ is O, NR^{d}, S, or Se;
[0700] R^{d} is independently hydrogen, alkyl, alkenyl, alkynyl, aryl, acyl, substituted silyl, carbamate, —P(O)(R^{e})₂, or —HP(O)(R^{e});
[0701] R^{e} is independently hydrogen, alkyl, aryl, alkenyl, alkynyl, alkyl-Y²—, alkenyl-Y²—, alkynyl-Y²—, aryl-Y²—, or heteroaryl-Y²—, or a cation which is Na⁺, Li⁺, or K⁺, or —O⁻;
[0702] Y² is O, NR^{d}, or S;
[0703] R^{z3} is a group represented by —CH₂—, —(CH₂)₂—, —CH₂NH—, or —CH₂N(CH₃)—.

[0704] Examples of G⁵ are trityl, 4-monomethoxytrityl, 4,4′-dimethoxytrityl, 4,4′,4″-trimethoxytrityl, 9-phenylxanthin-9-yl (Pixyl) and 9-(p-methoxyphenyl)xanthin-9-yl (MOX).

[0705] In some embodiments, a nucleoside 3′-phosphoramidite derivative is represented by formula (Z-Va′) or (Z-Vb′):

[chemical structure]

wherein each of G^{z1}, G^{z2}, G^{z5}, Bs, R^{z2}, and R^{z3} is independently as defined above and described herein.

[0706] In some embodiments, the invention relates to a method for synthesis of a chirally controlled oligonucleotide.

[0707] In some embodiments, a provided method comprises a first step of reacting a molecule comprising an achiral H-phosphonate moiety, the first activating reagent and a chiral reagent or a salt thereof to form a monomer. In some embodiments, a chiral reagent has chemical formula (Z-I) and the monomer may be represented by formula (Z-Va), (Z-Vb), (Z-Va′), or (Z-Vb′). The monomer reacts with the second activating reagent and a nucleoside to form a condensed intermediate. In some embodiments, a subsequent step comprises converting the condensed intermediate to the nucleic acid comprising a chiral X-phosphonate moiety.

[0708] In some embodiments, the present methods provide stable and commercially available materials as starting materials. In some embodiments, the present methods provide a stereocontrolled phosphorous atom-modified oligonucleotide using an achiral starting material.

[0709] As shown in the working examples, in some embodiments methods of the present invention do not cause degradation during deprotection steps. Further the method does not require special capping agents to produce phosphorus atom-modified oligonucleotide derivatives.

[0710] In some embodiments, the present invention provides a method for synthesis of stereocontrolled phosphorus atom-modified oligonucleotide derivatives using a chiral monomer. In some embodiments, the first step is reacting a nucleoside 3′-phosphoramidite derivative which is represented by formula (Z-Va), (Z-Vb), (Z-Va′), or (Z-Vb′) with the second activating reagent and a nucleoside to form a condensed intermediate. The second step is converting the condensed intermediate to the nucleic acid comprising a chiral X-phosphonate moiety.

[0711] All publications and patent applications disclosed herein in this specification are herein incorporated by reference in their entirety to the same extent as if each individual publication or patent application was specifically and individually indicated to be incorporated by reference.

[0712] As used in this “Further Embodiments of Chiral Reagents” section, in a condensation reaction, the term “activating reagent” refers to a reagent that activates a less reactive site and renders it more susceptible to attack by a nucleophile.

[0713] As used in this “Further Embodiments of Chiral Reagents” section, an “alkyl” group refers to an aliphatic hydrocarbon group. The alkyl moiety may be a saturated alkyl group (which means that it does not contain any units of unsaturation, e.g. carbon-carbon double bonds or carbon-carbon triple bonds) or the alkyl moiety may be an unsaturated alkyl group (which means that it contains at least one unit of unsaturation). The alkyl moiety, whether saturated or unsaturated, may be branched, straight chain, or include a cyclic portion. The point of attachment of an alkyl is at a carbon atom that is not part of a ring. The “alkyl” moiety may have 1 to 10 carbon atoms (whenever it appears herein, a numerical range such as “i to 10” refers to each integer in the given range; e.g., “i to 10 carbon atoms” means that the alkyl group may consist of 1 carbon atom, 2 carbon atoms, 3 carbon atoms, etc., up to and including 10 carbon atoms, although the present definition also covers the occurrence of the term “alkyl” where no numerical range is designated). Alkyl includes both branched and straight chain alkyl groups. The alkyl group of the compounds described herein may be designated as “C₁-C₆ alkyl” or similar designations. By way of example only, “C₁-C₆ alkyl” indicates that there are one, two, three, four, five, or six carbon atoms in the alkyl chain, i.e., the alkyl chain is selected from e.g., methyl, ethyl, propyl, iso-propyl, n-butyl, iso-butyl, sec-butyl, and tert-butyl. Typical alkyl groups include, but are in no way limited to, methyl, ethyl, propyl, isopropyl, butyl, isobutyl, tertiary butyl, pentyl, hexyl, allyl, cyclopropylmethyl, cyclobutylmethyl, cyclopentylmethyl, cyclohexylmethyl, and the like. In one aspect, an alkyl is a C₁-C₆ alkyl. C₁₋₃ alkyl group means straight or branched alkyl group that has 1 to 3 carbon atoms. Examples of C₁₋₃ alkyl group are methyl, ethyl, propyl and isopropyl. C₁₋₄ alkyl group means straight or branched alkyl group that has 1 to 4 carbon atoms. Examples of C₁₋₄ alkyl group are methyl, ethyl, propyl, isopropyl, butyl, isobutyl, and tert-butyl.

[0714] As used in this “Further Embodiments of Chiral Reagents” section, the term “aryl” refers to an aromatic ring wherein each of the atoms forming the ring is a carbon atom. Aryl rings are formed by five, six, seven, eight, nine, or more than nine carbon atoms. Aryl groups are a substituted or unsubstituted. In one aspect, an aryl is a phenyl or a naphthalenyl. Depending on the structure, an aryl group can be a monoradical or a diradical (i.e., an arylene group). In one aspect, an aryl is a C₆-C₁₀ aryl. C₆₋₁₄ aryl group means aryl group that has 6 to 14 carbon atoms. The examples of C₆₋₁₄ aryl group are phenyl, biphenyl, naphthyl, anthracyl, indanyl, phthalimidyl, naphthimidyl, phenanthridinyl, and tetrahydronaphthyl.

[0715] The term “aralkyl” refers to an alkyl group substituted with an aryl group. Suitable aralkyl groups include benzyl, picolyl, and the like, all of which may be optionally substituted.

[0716] As used in this “Further Embodiments of Chiral Reagents” section, An “acyl moiety” refers to an alkyl(C═O), aryl(C═O), or aralkyl(C═O) group. An acyl moiety can have an intervening moiety (Y) that is oxy, amino, thio, or seleno between the carbonyl and the hydrocarbon group. For example, an acyl group can be alkyl-Y—(C═O), aryl-Y—(C═O) or aralkyl-Y—(C═O).

[0717] As used in this “Further Embodiments of Chiral Reagents” section, “alkenyl” groups are straight chain, branch chain, and cyclic hydrocarbon groups containing at least one carbon-carbon double bond. Alkenyl groups can be substituted.

[0718] As used in this “Further Embodiments of Chiral Reagents” section, “alkynyl” groups are straight chain, branch chain, and cyclic hydrocarbon groups containing at least one carbon-carbon triple bond. Alkynyl groups can be substituted.

[0719] As used in this “Further Embodiments of Chiral Reagents” section, an “alkoxy” group refers to an alklyl group linked to oxygen i.e. (alkyl)-O— group, where alkyl is as defined herein. Examples include methoxy (—OCH₃) or ethoxy (—OCH₂CH₃) groups.

[0720] As used in this “Further Embodiments of Chiral Reagents” section, an “alkenyloxy” group refers to an alkenyl group linked to oxygen i.e. (alkenyl)-O— group, where alkenyl is as defined herein.

[0721] As used in this “Further Embodiments of Chiral Reagents” section, an “alkynyloxy” group refers to an alkynyl group linked to oxygen i.e. (alkynyl)-O— group, where alkynyl is as defined herein.

[0722] As used in this “Further Embodiments of Chiral Reagents” section, an “aryloxy” group refers to an aryl group linked to oxygen i.e. (aryl)-O-group, where the aryl is as defined herein. An example includes phenoxy (—OC₆H₅) group.

[0723] As used in this “Further Embodiments of Chiral Reagents” section, the term “alkylseleno” refers to an alkyl group having a substituted seleno group attached thereto i.e. (alkyl)-Se— group, wherein alkyl is defined herein.

[0724] As used in this “Further Embodiments of Chiral Reagents” section, the term “alkenylseleno” refers to an alkenyl group having a substituted seleno group attached thereto i.e. (alkenyl)-Se— group, wherein alkenyl is defined herein.

[0725] As used in this “Further Embodiments of Chiral Reagents” section, the term “alkynylseleno” refers to an alkynyl group having a substituted seleno group attached thereto i.e. (alkynyl)-Se— group, wherein alkenyl is defined herein.

[0726] As used in this “Further Embodiments of Chiral Reagents” section, the term “alkylthio” refers to an alkyl group attached to a bridging sulfur atom i.e. (alkyl)-S-group, wherein alkyl is defined herein. For example, an alkylthio is a methylthio and the like.

[0727] As used in this “Further Embodiments of Chiral Reagents” section, the term “alkenylthio” refers to an alkenyl group attached to a bridging sulfur atom i.e. (alkenyl)-S— group, wherein alkenyl is defined herein.

[0728] As used in this “Further Embodiments of Chiral Reagents” section, the term “alkynylthio” refers to an alkynyl group attached to a bridging sulfur atom i.e. (alkynyl)-S— group, wherein alkenyl is defined herein.

[0729] As used in this “Further Embodiments of Chiral Reagents” section, the term “alkylamino” refers to an amino group substituted with at least one alkyl group i.e. —NH(alkyl) or —N(alkyl)2, wherein alkyl is defined herein.

[0730] As used in this “Further Embodiments of Chiral Reagents” section, the term “alkenylamino” refers to an amino group substituted with at least one alkenyl group Le —NH(alkenyl) or —N(alkenyl)2, wherein alkenyl is defined herein.

[0731] As used in this “Further Embodiments of Chiral Reagents” section, the term “alkynylamino” refers to an amino group substituted with at least one alkynyl group i.e. —NH(alkynyl) or —N(alkynyl)2, wherein alkynyl is defined herein.

[0732] As used in this “Further Embodiments of Chiral Reagents” section, the term “halogen” is intended to include fluorine, chlorine, bromine and iodine.

[0733] As used in this “Further Embodiments of Chiral Reagents” section, a “fluorescent group” refers to a molecule that, when excited with light having a selected wavelength, emits light of a different wavelength. Fluorescent groups include, but are not limited to, indole groups, fluorescein, tetramethylrhodamine, Texas Red, BODIPY, 5-[(2-aminoethyl)amino]napthalene-1-sulfonic acid (EDANS), coumarin and Lucifer yellow.

[0734] As used in this “Further Embodiments of Chiral Reagents” section, an “ammonium ion” is a positively charged polyatomic cation of the chemical formula NH₄⁺.

[0735] As used in this “Further Embodiments of Chiral Reagents” section, an “alkylammonium ion” is an ammonium ion that has at least one of its hydrogen atoms replaced by an alkyl group, wherein alkyl is defined herein. Examples include triethylammonium ion, N, N-diisopropylethylammonium ion.

[0736] As used in this “Further Embodiments of Chiral Reagents” section, an “iminium ion” has the general structure (R^{x})₂C═N(R^{x})₂⁺ The R^{x} groups refer to alkyl, alkenyl, alkynyl, aryl groups as defined herein. A “heteroaromatic iminium ion” refers to an imminium ion where the nitrogen and its attached RX groups form a heteroaromatic ring. A “heterocyclic iminium ion” refers to an imminium ion where the nitrogen and its attached R^{x} groups form a heterocyclic ring.

[0737] As used in this “Further Embodiments of Chiral Reagents” section, the terms “amino” or “amine” refers to a —N(R^{h})₂ radical group, where each R^{h} is independently hydrogen, alkyl, fluoroalkyl, carbocyclyl, carbocyclylalkyl, aryl, aralkyl, heterocyclyl, heterocyclylalkyl, heteroaryl or heteroarylalkyl, unless stated otherwise specifically in the specification. When a —N(R^{h})₂ group has two R⁶ other than hydrogen they can be combined with the nitrogen atom to form a 4-, 5-, 6-, or 7-membered ring. For example, —N(R^{h})₂ is meant to include, but not be limited to, 1-pyrrolidinyl and 4-morpholinyl. Any one or more of the hydrogen, alkyl, fluoroalkyl, carbocyclyl, carbocyclylalkyl, aryl, aralkyl, heterocyclyl, heterocyclylalkyl, heteroaryl or heteroarylalkyl are optionally substituted by one or more substituents which independently are alkyl, heteroalkyl, alkenyl, alkynyl, cycloalkyl, heterocycloalkyl, aryl, arylalkyl, heteroaryl, heteroarylalkyl, hydroxy, halo, cyano, trifluoromethyl, trifluoromethoxy, nitro, trimethylsilyl, —ORⁱ, —SRⁱ, —OC(O)Rⁱ, —N(Rⁱ)₂, —C(O)Rⁱ, —C(O)ORⁱ, —OC(O)N(Rⁱ)₂, —C(O)N(Rⁱ)₂, —N(Rⁱ)C(O)OR, —N(Rⁱ)C(O)Rⁱ, —N(Rⁱ)C(O)N(Rⁱ)₂, N(Rⁱ)C(NRⁱ)N(Rⁱ)₂, —N(Rⁱ)S(O)NRⁱ (where t is 1 or 2), —S(O), or —S(O)ₜN(Rⁱ)₂ (where t is 1 or 2), where each Rⁱ is independently hydrogen, alkyl, fluoroalkyl, carbocyclyl, carbocyclylalkyl, aryl, aralkyl, heterocyclyl, heterocyclylalkyl, heteroaryl or heteroarylalkyl.

[0738] As used in this “Further Embodiments of Chiral Reagents” section, “carbamate” as used herein, refers to a moiety attached to an amino group which has the formula —C(O)OR where R is alkyl, fluoroalkyl, carbocyclyl, carbocyclylalkyl, aryl, aralkyl, heterocyclyl, heterocyclylalkyl, heteroaryl or heteroarylalkyl. Examples include but are not limited to Boc (tert-butyl-OC(O)—), CBz (benzyl-OC(O)—), Teoc (Me₃SiCH₂CH₂OC(O)—), alloc (allyl-OC(O)—), or Fmoc (9-fluorenylmethyl-OC(O)—) group

[0739] As used in this “Further Embodiments of Chiral Reagents” section, “substituted silyl” as used herein, refers to a moiety which has the formula R^{x}₃Si—. Examples include, but are not limited to, TBDMS (tert-butyldimethylsilyl), TBDPS (tert-butyldiphenylsilyl) or TMS (trimethylsilyl).

[0740] As used in this “Further Embodiments of Chiral Reagents” section, the term “thiol” refers to —SH groups, and include substituted thiol groups i.e. —SRJ groups, wherein RJ are each independently a substituted or unsubstituted alkyl, cycloalkyl, alkenyl, alkynyl, aryl aralkyl, heterocyclyl or heterocyclylalkyl group as defined herein.

[0741] In some embodiments, the present invention provides a chiral reagent or a salt thereof. In some embodiments, a chiral reagent is of the following chemical formula (Z-I):

[chemical structure]

wherein G^{z1} and G^{z2} are independently a hydrogen atom, a nitro group, a halogen atom, a cyano group (—CN), a group of formula (Z-II) or (Z-III), or both G^{z1} and G^{z2} taken together to form a group of formula (Z-IV). In some embodiments, the term “chiral reagent” is a chemical composition which is used to produce stereocontrolled phosphorous atom-modified nucleotide or oligonucleotide derivatives. A chiral reagent reacts with a nucleoside to form a chiral intermediate.

[0742] In some embodiments, a group of formula (Z-II) is of the following formula:

[chemical structure]

wherein G²¹ to G²³ are independently a hydrogen atom, a nitro group, a halogen atom, a cyano group or C₁₋₃ alkyl group. In some embodiments, examples of G21 to G23 are a hydrogen atom.

[0743] In some embodiments, a group of formula (Z-III) is of the following formula:

[chemical structure]

wherein G³¹ to G³³ are independently C₁₋₄ alkyl group, C₁₋₄ aryl group, C₁₋₄ alkoxy group, C₇-14 aralkyl group, C₁₋₄ alkyl C₁₋₄ aryl group, C₁₋₄ alkoxy C₆₋₁₄ aryl group, or C₆₋₁₄ aryl C₁₋₄ alkyl group. Examples of C₁₋₄ alkyl C₆₋₁₄ aryl group are methylphenyl group, and ethylphenyl group. Examples of C₁₋₄ alkoxy C₁₋₄ aryl group are methoxyphenyl group and ethoxyphenyl group. Examples of C₆₋₁₄ aryl C₁₋₄ alkyl groups are benzyl group and phenylethyl group. In some embodiments, examples of G³¹ to G³³ are independently a methyl group and a phenyl group.

[0744] In some embodiments, a group of formula (Z-IV) is of the following formula:

[chemical structure]

wherein G⁴¹ to G⁴⁶ are independently a hydrogen atom, a nitro group, a halogen atom, a cyano group or C₁₋₃ alkyl group. In some embodiments, examples of G41 to G46 are a hydrogen atom.

[0745] G³ and G⁴ are independently a hydrogen atom, C₁₋₃ alkyl group, C₆₋₁₄ aryl group, or both G³ and G⁴ taken together to form a heteroatom-containing ring that has 3 to 16 carbon atoms. In some embodiments, examples of G³ and G⁴ are that taken together to form a heteroatom-containing ring that has 3 to 16 carbon atoms with NH moiety in the formula (I).

[0746] In certain embodiments, a chiral reagent has following chemical formula (Z-I′).

[chemical structure]

[0747] In the formula (Z-I′), G^{z1} and G^{z2} are same as above and G^{z1} and G^{z2} are independently a hydrogen atom, a nitro group, a halogen atom, a cyano group, a group of formula (Z-II) or (Z-III), or both G^{z1} and G^{z2} taken together to form a group of formula (Z-IV).

[0748] In certain embodiments, a chiral reagent has chemical formula (Z-I′) and each of G^{z1} and G^{z2} is a group of formula (Z-II), wherein G²¹ to G²³ are independently a hydrogen atom, a nitro group, a halogen atom, a cyano group or C₁₋₃ alkyl group.

[0749] In certain embodiments, a chiral reagent has chemical formula (Z-I′) and each of G^{z1} and G^{z2} is a group of formula (Z-II) and each of G²¹ to G²³ is a hydrogen atom.

[0750] In certain embodiments, a chiral reagent has chemical formula (Z-I′) and G^{z1} is a hydrogen atom, G^{z2} is a group of formula (Z-II), and G²¹ to G²³ are independently a hydrogen atom, a nitro group, a halogen atom, a cyano group or C₁₋₃ alkyl group.

[0751] In certain embodiments, a chiral reagent has chemical formula (Z-I′) and G^{z1} is a hydrogen atom, G^{z2} is a group of formula (Z-II), each of G²¹ and G²² is a hydrogen atom and G²³ is a nitro group (—NO₂).

[0752] In certain embodiments, a chiral reagent has chemical formula (Z-I′) and G^{z1} is a hydrogen atom and G^{z2} is a group of formula (Z-III), and G³¹ to G³³ are independently C₁₋₄ alkyl group, C₆₋₁₄ aryl group, C₇-14 aralkyl group, C₁₋₄ alkyl C₆₋₁₄ aryl group, C₁₋₄ alkoxy C₆₋₁₄ aryl group, or C₆₋₁₄ aryl C₁₋₄ alkyl group.

[0753] In some embodiments, a chiral reagent has chemical formula (Z-I′) and G^{z1} is a hydrogen atom, G^{z2} is a group of formula (Z-III), and G³¹ to G³³ are independently C₁₋₄ alkyl group or C₆ aryl group (a phenyl group). Examples of C₁₋₄ alkyl group are methyl group, ethyl group, n-propyl group, iso-propyl group, n-butyl group and tert-butyl group.

[0754] In certain embodiments, a chiral reagent has chemical formula (Z-I′) and G^{z1} is a hydrogen atom, G^{z2} is a group of formula (Z-III), and G³¹ to G³³ are independently C₁₋₂ alkyl group (a methyl group or an ethyl group) or C₆ aryl group (a phenyl group).

[0755] In certain embodiments, a chiral reagent has chemical formula (Z-I′) and G^{z1} is a hydrogen atom, G^{z2} is a group of formula (Z-III), and G³¹ to G³³ are independently C₁₋₄ alkyl group.

[0756] In certain embodiments, a chiral reagent has chemical formula (Z-I′) and G^{z1} is a hydrogen atom, G^{z2} is a group of formula (Z-III), and G³¹ and G³³ are C₆ aryl group (a phenyl group) and G³² is C₁₋₂ alkyl group.

[0757] In certain embodiments, a chiral reagent has chemical formula (Z-I′) and G^{z1} and G^{z2}are taken together to form a group of formula (Z-IV), and G⁴¹ to G⁴⁶ are independently a hydrogen atom, a nitro group, a halogen atom, a cyano group or C₁₋₃ alkyl group.

[0758] In certain embodiments, a chiral reagent has chemical formula (Z-I′) and G^{z1} and G^{z2}are taken together to form a group of formula (Z-IV), wherein each of (G⁴¹ to G⁴⁶ is a hydrogen atom.

[0759] In certain embodiments, a chiral reagent is selected from one of chemical formulae 3a, 3b, 5a, Z-5b, 7a, 7b, 9a, 9b, 11a and 11b:

[chemical structure]

[chemical structure]

Namely, in some embodiments, a chiral reagent is selected from:
[0760] (S)-2-(Methyldiphenylsilyl)-1-((S)-1-pyrrolidin-2-yl)ethanol (3a),
[0761] (R)-2-(Methyldiphenylsilyl)-1-((R)-1-pyrrolidin-2-yl)ethanol (3b),
[0762] (S)-2-(Trimethylsilyl)-1-((S)-1-pyrrolidin-2-yl)ethanol (5a),
[0763] (R)-2-(Trimethylsilyl)-1-((R)-1-pyrrolidin-2-yl)ethanol (Z-5b),
[0764] (R)-2,2-Diphenyl-1-((S)-pyrrolidin-2-yl)ethanol (7a),
[0765] (S)-2,2-Diphenyl-1-((R)-pyrrolidin-2-yl)ethanol (7b),
[0766] (R)-2-(4-Nitrophenyl)-1-((S)-pyrrolidin-2-yl)ethanol (9a),
[0767] (S)-2-(4-Nitrophenyl)-1-((R)-pyrrolidin-2-yl)ethanol (9b),
[0768] (R)-(9H-Fluororen-9-yl)((S)-pyrrolidin-2-yl)methanol (11a), or
[0769] (S)-(9H-Fluororen-9-yl)((R)-pyrrolidin-2-yl)methanol (11b).

[0770] The chiral reagent reacts with a nucleic acid or modified nucleic acid to be an asymmetric auxiliary group. A nucleoside 3′-phosphoramidite derivative, which is an intermediate of manufacturing a stereocontrolled phosphorous atom-modified oligonucleotide derivative, is obtained by chiral reagent reacting with a nucleic acid or modified nucleic acid.

[0771] In some embodiments, the invention provides a nucleoside 3′-phosphoramidite derivative which is represented by formula (Z-Va) or (Z-Vb). The compounds of formula (Z-Va) and (Z-Vb) are known as monomers that are used in synthesizing oligonucleotide derivatives. These compounds are also known as oxazaphospholidine monomers. The sugar moieties of the compounds represented by formula (Z-Vb) are known as BNA and LNA (when R^{z3} is a methylene group).

[chemical structure]

[0772] In the formula (Z-Va) and (Z-Va), G^{z1} to G^{z4} are same as above, G^{z5} is a protective group of the hydroxyl group, and Bs is a group selected from the groups represented by formula (Z-VI) to (Z-XI) or derivatives thereof.

[chemical structure]

Examples of Bs are an adenine, a thymine, a cytosine, a guanine, an uracil, a 5-methylcytosine or derivative thereof;
[0773] R^{z2} is independently hydrogen, —OH, —SH, —NR^{d}R^{d}, —N₃, halogen, alkyl, alkenyl, alkynyl, alkyl-Y¹-, alkenyl-Y¹-, alkynyl-Y¹-, aryl-Y¹-, heteroaryl-Y¹-, —OR^{b}, or —SR^{b}, wherein R^{b} is a blocking moiety;
[0774] Y¹ is O, NR^{d}, S, or Se;
[0775] R^{d} is independently hydrogen, alkyl, alkenyl, alkynyl, aryl, acyl, substituted silyl, carbamate, —P(O)(R^{e})₂, or —HP(O)(R^{e});
[0776] R^{e} is independently hydrogen, alkyl, aryl, alkenyl, alkynyl, alkyl-Y²—, alkenyl-Y²—, alkynyl-Y²—, aryl-Y²—, or heteroaryl-Y²—, or a cation which is Na⁺, Li⁺, or K⁺, or —O⁻;
[0777] Y² is O, NR^{d}, or S;
[0778] R^{z3} is a group represented by —CH₂—, —(CH₂)₂—, —CH₂NH—, or —CH₂N(CH₃)—.

[0779] Examples of G^{z5} is trityl, 4-monomethoxytrityl, 4,4′-dimethoxytrityl, 4,4′,4″-trimethoxytrityl, 9-phenylxanthin-9-yl (Pixyl) and 9-(p-methoxyphenyl)xanthin-9-yl (MOX).

[0780] In some embodiments, Bs is an adenine, a thymine, a cytosine, a guanine, or derivative thereof. In some embodiments, Bs is a nucleobase or a modified nucleobase. Exemplary derivatives are, for instance, those disclosed in JP 2005-89441 A, and are represented as follows:

[chemical structure]

wherein, in the above formula, each of R⁸ to R¹⁰ is independently C₁₋₁₀ alkyl, C₆-C₁₀ aryl, C₆-C₁₀ aralkyl, or C₆-C₁₀ aryloxyalkyl. In some embodiments, R⁸ is methyl, isopropyl, phenyl, benzyl, and phenoxymethyl. In some embodiments, R⁹ and R¹⁰ are C₁₋₄ alkyl group.

[0781] In some embodiments, a nucleoside 3′-phosphoramidite derivative is represented by formula (Z-Va′) or (Z-Vb′):

[chemical structure]

wherein, in the formula (Z-Va′) and (Z-Vb′), each of G^{z1}, G^{z2}, G^{z5}, Bs, R^{z2} and R^{z3} are the same as above. In certain embodiments, a nucleoside 3′-phosphoramidite derivative is a chiral monomer which is used to produce stereocontrolled phosphorous atom-modified nucleotide and oligonucleotide. Examples of the nucleoside 3′-phosphoramidite derivatives are represented by the following formulae: 12a, 12b, 13a, 13b, 14a, 14b, 15a, 15b, 16a, 16b, 17a, 17b, 18a, 18b, 19a, 19b, 20a, 20b, 21a, 21b, 22a, 22b, 23a, 23b, 24a, 24b, 25a, 25b, 26a, 26b, 27a, 27b, 28a, 28b, 29a, 29b, 30a, 30b, 31a, 31b, 32a, 32b, 33a, 33b, 34a, 34b and 35a.

[chemical structure]

[chemical structure]

[chemical structure]

[chemical structure]

[chemical structure]

[chemical structure]

[chemical structure]

[chemical structure]

[chemical structure]

[chemical structure]

[chemical structure]

[chemical structure]

[chemical structure]

[chemical structure]

[chemical structure]

DMTr represents a 4,4′-dimethoxytrityl group and TOM represents a triisopropylsiloxymethyl group.

[0782] Examples using a nucleoside 3′-phosphoramidite derivative are disclosed in, e.g, JP 2005-89441 A. By repeating steps of condensation and de-protection, methods of the present invention facilitate lengthening the chain of oligonucleotide, as disclosed therein.

[0783] In some embodiments, an oligonucleotide is as shown in formula (Z-X):

[chemical structure]

wherein, in the formula (Z-X), X^{z} represents sulfide (═S), C₁₋₃ alkyl, C₁₋₃ alkoxy, C₁₋₃ alkylthio, C₆-C₁₀ aryl, C₆-C₁₀ aralkyl, or C₆-C₁₀ aryloxialkyl. In some embodiments, X^{z} represents sulfide (═S). n^{z} is an integer that represents 1 to 150, 1 to 100, 1 to 50, or 1 to 30. In some embodiments, n^{z} is preferably 2 to 100, preferably 10 to 100, preferably 10 to 50, and more preferably 15 to 30.

[0784] In some embodiments, the present invention provides methods for synthesis of a stereocontrolled phosphorus atom-modified oligonucleotide derivative. In some embodiments, the first step is a step of reacting a molecule comprising an achiral H-phosphonate moiety, the first activating reagent and a chiral reagent or a salt thereof to form a monomer. In some embodiments, the chiral reagent has chemical formula (Z-I) or (Z-I′) and the monomer may be represented by formula (Z-Va), (Z-Vb), (Z-Va′), or (Z-Vb′). The monomer reacts with the second activating reagent and a nucleoside to form a condensed intermediate. Next step is a step of converting the condensed intermediate to the nucleic acid comprising a chiral X-phosphonate moiety. In some embodiments, the methods are as described in WO 2010/064146. In some embodiments, the steps are as described in route A and route B of WO 2010/064146.

[0785] In some embodiments, the present invention provides a method of synthesizing chirally controlled oligonucleotide as illustrated in Scheme Z-1 below.

[chemical structure]

### Activation

[0786] An achiral H-phosphonate moiety is treated with the first activating reagent to form the first intermediate. In one embodiment, the first activating reagent is added to the reaction mixture during the condensation step. Use of the first activating reagent is dependent on reaction conditions such as solvents that are used for the reaction. Examples of the first activating reagent are phosgene, trichloromethyl chloroformate, bis(trichloromethyl)carbonate (BTC), oxalyl chloride, Ph₃PCl₂, (PhO)₃PCl₂, N,N′-bis(2-oxo-3-oxazolidinyl)phosphinic chloride (BopCl), 1,3-dimethyl-2-(3-nitro-1,2,4-triazol-1-yl)-2-pyrrolidin-1-yl-1,3,2-diazaphospholidinium hexafluorophosphate (MNTP), or 3-nitro-1,2,4-triazol-1-yl-tris(pyrrolidin-1-yl)phosphonium hexafluorophosphate (PyNTP).

[0787] The example of achiral H-phosphonate moiety is a compound shown in the above Scheme. DBU represents 1,8-diazabicyclo[5.4.0]undec-7-ene. H⁺ DBU may be, for example, ammonium ion, alkylammonium ion, heteroaromatic iminium ion, or heterocyclic iminium ion, any of which is primary, secondary, tertiary or quaternary, or a monovalent metal ion.

Reacting with Chiral Reagent

[0788] After the first activation step, the activated achiral H-phosphonate moiety reacts with a chiral reagent, which is represented by formula (Z-I) or (Z-I′), to form a chiral intermediate of formula (Z-Va), (Z-Vb), (Z-Va′), or (Z-Vb′).

### Stereospecific Condensation Step

[0789] A chiral intermediate of Formula Z-Va ((Z-Vb), (Z-Va′), or (Z-Vb′)) is treated with the second activating reagent and a nucleoside to form a condensed intermediate. The nucleoside may be on solid support. Examples of the second activating reagent are 4,5-dicyanoimidazole (DCI), 4,5-dichloroimidazole, 1-phenylimidazolium triflate (PhIMT), benzimidazolium triflate (BIT), benztriazole, 3-nitro-1,2,4-triazole (NT), tetrazole, 5-ethylthiotetrazole (ETT), 5-benzylthiotetrazole (BTT), 5-(4-nitrophenyl)tetrazole, N-cyanomethylpyrrolidinium triflate (CMPT), N-cyanomethylpiperidinium triflate, N-cyanomethyldimethylammonium triflate. A chiral intermediate of Formula Z-Va ((Z-Vb), (Z-Va′), or (Z-Vb′)) may be isolated as a monomer. Usually, the chiral intermediate of Z-Va ((Z-Vb), (Z-Va′), or (Z-Vb′)) is not isolated and undergoes a reaction in the same pot with a nucleoside or modified nucleoside to provide a chiral phosphite compound, a condensed intermediate. In other embodiments, when the method is performed via solid phase synthesis, the solid support comprising the compound is filtered away from side products, impurities, and/or reagents.

### Capping Step

[0790] If the final nucleic acid is larger than a dimer, the unreacted —OH moiety is capped with a blocking group and the chiral auxiliary in the compound may also be capped with a blocking group to form a capped condensed intermediate. If the final nucleic acid is a dimer, then the capping step is not necessary.

### Modifying Step

[0791] The compound is modified by reaction with an electrophile. The capped condensed intermediate may be executed modifying step. In some embodiments, the modifying step is performed using a sulfur electrophile, a selenium electrophile or a boronating agent. Examples of modifying steps are step of oxidation and sulfurization.

[0792] In some embodiments of the method, the sulfur electrophile is a compound having one of the following formulas:

S₈ (Formula Z-B), Z^{z1}—S—S—Z^{z2}, or Z^{z1}—S—V^{z}—Z^{z2};

wherein Z^{z1} and Z^{z2} are independently alkyl, aminoalkyl, cycloalkyl, heterocyclic, cycloalkylalkyl, heterocycloalkyl, aryl, heteroaryl, alkyloxy, aryloxy, heteroaryloxy, acyl, amide, imide, or thiocarbonyl, or Z^{z1} and Z^{z2} are taken together to form a 3 to 8 membered alicyclic or heterocyclic ring, which may be substituted or unsubstituted; V^{z} is SO₂, O, or NR^{f}; and R^{f} is hydrogen, alkyl, alkenyl, alkynyl, or aryl.

[0793] In some embodiments of the method, the sulfur electrophile is a compound of following Formulae Z-A, Z-B, Z-C, Z-D, Z-E, or Z-F:

[chemical structure]

[0794] In some embodiments, the selenium electrophile is a compound having one of the following formulae:

Se (Formula Z-G), Z^{z3}—Se—Se—Z^{z4}, or Z^{z3}—Se—V^{z}—Z^{z4};

wherein Z^{z3} and Z^{z4} are independently alkyl, aminoalkyl, cycloalkyl, heterocyclic, cycloalkylalkyl, heterocycloalkyl, aryl, heteroaryl, alkyloxy, aryloxy, heteroaryloxy, acyl, amide, imide, or thiocarbonyl, or Z^{z3} and Z^{z4} are taken together to form a 3 to 8 membered alicyclic or heterocyclic ring, which may be substituted or unsubstituted; V^{z} is SO₂, S, O, or NR^{f}; and R^{f} is hydrogen, alkyl, alkenyl, alkynyl, or aryl.

[0795] In some embodiments, the selenium electrophile is a compound of Formula Z-G, Z-H, Z-I, Z-J, Z-K, or Z-L.

[chemical structure]

[0796] In some embodiments, the boronating agent is borane-N,N-diisopropylethylamine (BH₃ DIPEA), borane-pyridine (BH₃ Py), borane-2-chloropyridine (BH₃ CPy), borane-aniline (BH₃ An), borane-tetrahydrofiirane (BH₃ THF), or borane-dimethylsulfide (BH₃ Me₂S).

[0797] In some embodiments of the method, the modifying step is an oxidation step. In some embodiments of the method, the modifying step is an oxidation step using similar conditions as described above in this application. In some embodiments, an oxidation step is as disclosed in, e.g., JP 2010-265304 A and WO2010/064146.

### Chain Elongation Cycle and De-Protection Step

[0798] The capped condensed intermediate is deblocked to remove the blocking group at the 5′-end of the growing nucleic acid chain to provide a compound. The compound is optionally allowed to re-enter the chain elongation cycle to form a condensed intermediate, a capped condensed intermediate, a modified capped condensed intermediate, and a 5′-deprotected modified capped intermediate. Following at least one round of chain elongation cycle, the 5′-deprotected modified capped intermediate is further deblocked by removal of the chiral auxiliary ligand and other protecting groups for, e.g., nucleobase, modified nucleobase, sugar and modified sugar protecting groups, to provide a nucleic acid. In other embodiments, the nucleoside comprising a 5′-OH moiety is an intermediate from a previous chain elongation cycle as described herein. In yet other embodiments, the nucleoside comprising a 5′-OH moiety is an intermediate obtained from another known nucleic acid synthetic method. In embodiments where a solid support is used, the phosphorus-atom modified nucleic acid is then cleaved from the solid support. In certain embodiments, the nucleic acids is left attached on the solid support for purification purposes and then cleaved from the solid support following purification.

[0799] In yet other embodiments, the nucleoside comprising a 5′-OH moiety is an intermediate obtained from another known nucleic acid synthetic method. In yet other embodiments, the nucleoside comprising a 5′-OH moiety is an intermediate obtained from another known nucleic acid synthetic method as described in this application. In yet other embodiments, the nucleoside comprising a 5′-OH moiety is an intermediate obtained from another known nucleic acid synthetic method comprising one or more cycles illustrated in Scheme I. In yet other embodiments, the nucleoside comprising a 5′-OH moiety is an intermediate obtained from another known nucleic acid synthetic method comprising one or more cycles illustrated in Scheme I-b, I-c or I-d.

[0800] In some embodiments, the present invention provides oligonucleotide synthesis methods that use stable and commercially available materials as starting materials. In some embodiments, the present invention provides oligonucleotide synthesis methods to produce stereocontrolled phosphorus atom-modified oligonucleotide derivatives using an achiral starting material.

[0801] In some embodiments, the method of the present invention does not cause degradations under the de-protection steps. Further the method does not require special capping agents to produce phosphorus atom-modified oligonucleotide derivatives.

[0802] In some embodiments, the present invention provides methods for the synthesis of stereocontrolled phosphorus atom-modified oligonucleotide derivatives using a chiral monomer. In some embodiments, the first step is reacting a nucleoside 3′-phosphoramidite derivative which is represented by formula (Z-Va), (Z-Vb), (Z-Va′), or (Z-Vb′) with the second activating reagent and a nucleoside to form a condensed intermediate. The second step is converting the condensed intermediate to the nucleic acid comprising a chiral X-phosphonate moiety. An exemplary method is illustrated Scheme Z-2 below.

[chemical structure]

[0803] The detailed conditions of the Scheme Z-2 are similar to that of Scheme Z-1. The starting material of formula Z-Va (Z-Vb), especially of formula Z-Va′ (or Z-Vb′), is chemically stable. As shown in a working example, the method of the present invention does not cause degradations under the de-protection steps. Further the method does not require special capping agents to produce phosphorus atom-modified oligonucleotide derivatives.

[0804] In some embodiments, mechanism for the removal of auxiliaries is shown as illustrated in Scheme Z-3, below.

[chemical structure]

[0805] In Scheme Z-3, Nu stands for is a nucleophile. In some embodiments, the mechanism in Scheme Z-3 is thought to be different from the previous mechanism for the removal of auxiliaries.

[0806] In some embodiments, the present invention provides a chiral reagent or a salt thereof, the chiral reagent having following chemical formula (Z-I):

[chemical structure]

wherein G^{z1} and G^{z2} are independently a hydrogen atom, a nitro group, a halogen atom, a cyano group, a group of formula (Z-II) or (Z-III), or both G^{z1} and G^{z2} taken together to form a group of formula (Z-IV),

[chemical structure]

wherein G²¹ to G²³ are independently a hydrogen atom, a nitro group, a halogen atom, a cyano group or C₁₋₃ alkyl group,

[chemical structure]

wherein G³¹ to G³³ are independently C₁₋₄ alkyl group, C₁₋₄ alkoxy group, C₆₋₁₄ aryl group, C₇-14 aralkyl group, C₁₋₄ alkyl C₆₋₁₄ aryl group, C₁₋₄ alkoxy C₆₋₁₄ aryl group, or C₆₋₁₄ aryl C₁₋₄ alkyl group,

[chemical structure]

wherein G⁴¹ to G⁴⁶ are independently a hydrogen atom, a nitro group, a halogen atom, a cyano group or C₁₋₃ alkyl group,
G^{z3} and G^{z4} are independently a hydrogen atom, C₁₋₃ alkyl group, C₆₋₁₄ aryl group, or both G^{z3} and G^{z4} taken together to form a heteroatom-containing ring that has 3 to 16 carbon atoms.

[0807] In some embodiments, the present invention provides a chiral reagent, or a salt thereof, of formula Z-1 has following chemical formula (Z-I′)

[chemical structure]

wherein each variable is independently as defined above and described herein. In some embodiments, the present invention provides a chiral reagent, or a salt thereof, of formula (Z-1′), wherein each of G^{z1} and G^{z2} is a group of formula (Z-II), wherein G²¹ to G²³ are independently a hydrogen atom, a nitro group, a halogen atom, a cyano group or C₁₋₃ alkyl group. In some embodiments, the present invention provides a chiral reagent, or a salt thereof, of formula (Z-1′), wherein each of G^{z1} and G^{z2} is a group of formula (Z-II), wherein each of G²¹ to G²³ is a hydrogen atom. In some embodiments, the present invention provides a chiral reagent, or a salt thereof, of formula (Z-1′), wherein G^{z1} is a hydrogen atom, and G^{z2} is a group of formula (Z-II), wherein G²¹ to G²³ are independently a hydrogen atom, a nitro group, a halogen atom, a cyano group or C₁₋₃ alkyl group. In some embodiments, the present invention provides a chiral reagent, or a salt thereof, of formula (Z-1′), wherein G^{z1} is a hydrogen atom, and G^{z2} is a group of formula (Z-II), wherein each of G²¹ and G²² is a hydrogen atom and G²³ is a nitro group. In some embodiments, the present invention provides a chiral reagent, or a salt thereof, of formula (Z-1′), wherein G^{z1} is a hydrogen atom, and G^{z2} is a group of formula (Z-III), wherein G³¹ to G³³ are independently C₁₋₄ alkyl group, C₆₋₁₄ aryl group, C₇-14 aralkyl group, C₁₋₄ alkyl C₆₋₁₄ aryl group, C₁₋₄ alkoxy C₆₋₁₄ aryl group, or C₆₋₁₄ aryl C₁₋₄ alkyl group. In some embodiments, the present invention provides a chiral reagent, or a salt thereof, of formula (Z-1′), wherein G^{z1} is a hydrogen atom, and G^{z2} is a group of formula (Z-III), wherein G³¹ to G³³ are independently C₁₋₄ alkyl group, C₆ aryl group, C₇-10 aralkyl group, C₁₋₄ alkyl C₆ aryl group, C₁₋₄ alkoxy C₆ aryl group, or C₆ aryl C₁₋₄ alkyl group. In some embodiments, the present invention provides a chiral reagent, or a salt thereof, of formula (Z-1′), wherein G^{z1} is a hydrogen atom, and G^{z2} is a group of formula (Z-III), wherein G³¹ to G³³ are independently C₁₋₄ alkyl group, or C₆ aryl group. In some embodiments, the present invention provides a chiral reagent, or a salt thereof, of formula (Z-1′), wherein G^{z1} is a hydrogen atom, and G^{z2} is a group of formula (Z-III), wherein G³¹ and G³³ are C₆ aryl group and G³² is C₁₋₂ alkyl group. In some embodiments, the present invention provides a chiral reagent, or a salt thereof, of formula (Z-1′), wherein G^{z1} is a hydrogen atom, and G^{z2} is a group of formula (Z-III), wherein G³¹ to G³³ are independently C₁₋₄ alkyl group. In some embodiments, the present invention provides a chiral reagent, or a salt thereof, of formula (Z-1′), wherein G^{z1} is a hydrogen atom, and G^{z2} is a group of formula (Z-III), wherein G³¹ and G³³ are C₆ aryl group and G³² is C₁₋₄ alkyl group. In some embodiments, the present invention provides a chiral reagent, or a salt thereof, of formula (Z-1′), wherein G^{z1} is a hydrogen atom, and G^{z2} is a group of formula (Z-IV), wherein G⁴¹ to G⁴⁶ are independently a hydrogen atom, a nitro group, a halogen atom, a cyano group or C₁₋₃ alkyl group. In some embodiments, the present invention provides a chiral reagent, or a salt thereof, of formula (Z-1′), wherein G^{z1} and G^{z2} are taken together to form a group of formula (Z-IV), wherein G⁴¹ to G⁶ are independently a hydrogen atom, a nitro group, a halogen atom, a cyano group or C₁₋₃ alkyl group. In some embodiments, the present invention provides a chiral reagent, or a salt thereof, of formula (Z-1′), wherein G^{z1} and G^{z2} are taken together to form a group of formula (Z-IV), wherein each of G⁴¹ to G⁴⁶ is a hydrogen atom.

[0808] In some embodiments, a chiral reagent or a salt thereof is selected from formulae 3a, 3b, 5a, Z-5b, 7a, 7b, 9a, 9b, 11a and 11b.

[0809] In some embodiments, the present invention provides a nucleoside 3′-phosphoramidite derivative which is represented by formula Z-Va or Z-Vb:

[chemical structure]

wherein G^{z1} and G^{z2} are independently a hydrogen atom, a nitro group, a halogen atom, a cyano group, a group of formula (Z-II) or (Z-III), or both G^{z1} and G^{z2} taken together to form a group of formula (Z-IV),

[chemical structure]

wherein G²¹ to G²³ are independently a hydrogen atom, a nitro group, a halogen atom, a cyano group or C₁₋₃ alkyl group,

[chemical structure]

wherein G³¹ to G³³ are independently C₁₋₄ alkyl group, C₁₋₄ alkoxy group, C₆₋₁₄ aryl group, C₇-14 aralkyl group, C₁₋₄ alkyl C₆₋₁₄ aryl group, C₁₋₄ alkoxy C₆₋₁₄ aryl group, or C₆₋₁₄ aryl C₁₋₄ alkyl group,

[chemical structure]

wherein G⁴¹ to G⁴⁶ are independently a hydrogen atom, a nitro group, a halogen atom, a cyano group or C₁₋₃ alkyl group;
[0810] G^{z3} and G^{z4} are independently a hydrogen atom, C₁₋₃ alkyl group, C₆₋₁₄ aryl group, or both G^{z3} and G^{z4} taken together to form a heteroatom-containing ring that has 3 to 16 carbon atoms;
[0811] G^{z5} is a protective group of a hydroxyl group;
[0812] R^{z2} is independently hydrogen, —OH, —SH, —NR^{d}R^{d}, —N₃, halogen, alkyl, alkenyl, alkynyl, alkyl-Y¹—, alkenyl-Y¹—, alkynyl-Y¹—, aryl-Y¹—, heteroaryl-Y¹—, —OR^{b}, or —SR^{b}, wherein R^{b} is a blocking moiety;
[0813] Y¹ is O, NR^{d}, S, or Se;
[0814] R^{d} is independently hydrogen, alkyl, alkenyl, alkynyl, aryl, acyl, substituted silyl, carbamate, —P(O)(R^{e})₂, or —HP(O)(R^{e});
[0815] R^{e} is independently hydrogen, alkyl, aryl, alkenyl, alkynyl, alkyl-Y²—, alkenyl-Y²—, alkynyl-Y²—, aryl-Y²—, or heteroaryl-Y²—, or a cation which is Na⁺, Li⁺, or K⁺, or —O⁻;
[0816] Y² is O, NR^{d}, or S;
[0817] R^{z3} is a group represented by —CH₂—, —(CH₂)₂—, —CH₂NH—, or —CH₂N(CH₃)—; and
[0818] Bs is a group selected from the groups represented by following formula (Z-VI) to (Z-XI) or derivatives thereof.

[chemical structure]

[0819] In some embodiments, the present invention provides a nucleoside 3′-phosphoramidite derivative of formula Z-Va or Z-Vb, having the structure of Z-Va′ or Z-Vb′):

[chemical structure]

wherein each variable is independently as defined above and described herein.

[0820] In some embodiments, the present invention provides a nucleoside 3′-phosphoramidite derivative selected from formulae 12a, 12b, 13a, 13b, 14a, 14b, 15a, 15b, 16a, 16b, 17a, 17b, 18a, 18b, 19a, 19b, 20a, 20b, 21a, 21b, 22a, 22b, 23a, 23b, 24a, 24b, 25a, 25b, 26a, 26b, 27a, 27b, 28a, 28b, 29a, 29b, 30a, 30b, 31a, 31b, 32a, 32b, 33a, 33b, 34a, 34b and 35a. In some embodiments, the present invention provides a nucleoside 3′-phosphoramidite derivative selected from formulae 12a, 12b, 13a, 13b, 14a, 14b, 15a, 15b, 16a, 16b, 17a, 17b, 18a, 18b, 19a, 19b, 20a, 20b, 21a, 21b, 22a, 22b, 23a, 23b, 24a, 24b, 25a, 25b, 26a, or 26b.

[0821] In some embodiments, the present invention provides a method for synthesis of stereocontrolled phosphorus atom-modified oligonucleotide derivatives comprising steps of: reacting a molecule comprising an achiral H-phosphonate moiety, a chiral reagent or a salt thereof to form a monomer of a nucleoside 3′-phosphoramidite derivative;

reacting the monomer and a nucleoside to form a condensed intermediate; and
converting the condensed intermediate to the nucleic acid comprising a chiral X-phosphonate moiety;
wherein the chiral reagent has following chemical formula (Z-I).

[0822] In some embodiments, the present invention provides a method for synthesis of stereocontrolled phosphorus atom-modified oligonucleotide derivatives comprising steps of:

reacting a molecule comprising an achiral H-phosphonate moiety, a chiral reagent or a salt thereof to form a monomer of a nucleoside 3′-phosphoramidite derivative;
reacting the monomer and a nucleoside to form a condensed intermediate; and
converting the condensed intermediate to the nucleic acid comprising a chiral X-phosphonate moiety;
wherein the chiral reagent has following chemical formula (Z-I′).

[0823] In some embodiments, the present invention provides a method for synthesis of stereocontrolled phosphorus atom-modified oligonucleotide derivatives comprising steps of: reacting a molecule comprising an achiral H-phosphonate moiety, a chiral reagent or a salt thereof to form a monomer of a nucleoside 3′-phosphoramidite derivative;

reacting the monomer and a nucleoside to form a condensed intermediate; and
converting the condensed intermediate to the nucleic acid comprising a chiral X-phosphonate moiety;
wherein the chiral reagent is selected from formulae 3a, 3b, 5a, Z-5b, 7a, 7b, 9a, 9b, 11a and 11b.

[0824] In some embodiments, the present invention provides a method for synthesis of stereocontrolled phosphorus atom-modified oligonucleotide derivatives comprising steps of: reacting a nucleoside 3′-phosphoramidite derivative which is represented by formula (Z-Va) or (Z-Vb), with an activating reagent and a nucleoside to form a condensed intermediate; and converting the condensed intermediate to the nucleic acid comprising a chiral X-phosphonate moiety.

[0825] In some embodiments, the present invention provides a method for synthesis of stereocontrolled phosphorus atom-modified oligonucleotide derivatives comprising steps of: reacting a nucleoside 3′-phosphoramidite derivative represented by formula (Z-Va) or (Z-Vb), with an activating reagent and a nucleoside to form a condensed intermediate; and converting the condensed intermediate to the nucleic acid comprising a chiral X-phosphonate moiety; and wherein the nucleoside 3′-phosphoramidite derivative represented by formula (Z-Va) or (Z-Vb) is selected from formulae 12a, 12b, 13a, 13b, 14a, 14b, 15a, 15b, 16a, 16b, 17a, 17b, 18a, 18b, 19a, 19b, 20a, 20b, 21a, 21b, 22a, 22b, 23a, 23b, 24a, 24b, 25a, 25b, 26a, 26b, 27a, 27b, 28a, 28b, 29a, 29b, 30a, 30b, 31a, 31b, 32a, 32b, 33a, 33b, 34a, 34b and 35a. In some embodiments, the present invention provides a method for synthesis of stereocontrolled phosphorus atom-modified oligonucleotide derivatives comprising steps of:

reacting a nucleoside 3′-phosphoramidite derivative represented by formula (Z-Va) or (Z-Vb), with an activating reagent and a nucleoside to form a condensed intermediate; and converting the condensed intermediate to the nucleic acid comprising a chiral X-phosphonate moiety; and
wherein the nucleoside 3′-phosphoramidite derivative represented by formula (Z-Va) or (Z-Vb) is selected from formulae 12a, 12b, 13a, 13b, 14a, 14b, 15a, 15b, 16a, 16b, 17a, 17b, 18a, 18b, 19a, 19b, 20a, 20b, 21a, 21b, 22a, 22b, 23a, 23b, 24a, 24b, 25a, 25b, 26a, and 26b.

### Preparation and Use of Certain Chiral Auxiliaries of Formula Z-I

### Abbreviation

[0826] ac: acetyl
[0827] bz: benzoyl
[0828] CSO: (1S)-(+)-(10-camphorsulfonyl)oxaziridine
[0829] DBU: 1,8-diazabicyclo[5.4.0]undec-7-ene
[0830] DCA: dichloroacetic acid
[0831] DCM: dichloromethane, CH₂Cl₂
[0832] Tr: trityl, triphenylmethyl
[0833] MeIm: N-methylimidazole
[0834] NIS: N-iodosuccinimide
[0835] pac: phenoxyacetyl
[0836] Ph: phenyl
[0837] PhIMT: N-phenylimidazolium triflate
[0838] POS: 3-phenyl-1,2,4-dithiazoline-5-one
[0839] TBS: tert-butyldimethylsilyl
[0840] TBDPS: tert-butyldiphenylsilyl
[0841] TOM: triisopropylsiloxymethyl
[0842] TFA: trifluoroacetic acid

### General Procedure for the Synthesis of Chirally Controlled Oligonucleotides-1.

[0843] The automated solid-phase synthesis of chirally controlled oligonucleotides was performed according to the cycles shown in Table Z-1.

TABLE Z-1
Synthesis procedure.

| step | operation | reagents and solvent | volume | waiting time | |
|---|---|---|---|---|---|
| 1 | detritylation | 3% DCA/DCM | 1.6 mL | 20 | s |
| 2 | coupling | 0.1M monomer/MeCN + 1M PhIMT | 0.5 mL | 5 | min |
| 3 | capping | Ac₂O/THF-pyridine + 16% MeIm/THF | 0.5 mL | 30 | s |
| 4 | oxidation/sulfurization | 0.5M CSO/MeCN or 0.1M POS/MeCN | 0.5 mL | 90 | s |

### General Procedure for the Synthesis of Chirally Controlled Oligonucleotides-2.

[0844] The automated solid-phase synthesis of chirally controlled oligonucleotides was performed according to the cycles shown in Table Z-2.

TABLE Z-2

| step | operation | reagents and solvent | volume | waiting time | |
|---|---|---|---|---|---|
| 1 | detritylation | 3% DCA/DCM | 1.6 mL | 20 | s |
| 2 | coupling | pre-activated monomer* + 1M PhIMT | 0.5 mL | 5 | min |
| 3 | capping | Ac₂O/THF-pyridine + 16% MeIm/THF | 0.5 mL | 30 | s |
| 4 | oxidation/sulfurization | 0.5M CSO/MeCN or 0.1M POS/MeCN | 0.5 mL | 90 | s |

*preparation of pre-activated monomer in Step 2 of TableZ- 2:

[0845] Nucleoside-3′-H-phosphonate monoester is dried by repeated coevaporations with dry toluene and then dissolved in dry MeCN. Ph₃PCl₂ is added to the solution, and the mixture is stirred for 5 min. To the mixture, a solution of chiral reagent, which is repeated coevaportions with dry toluene and dissolved in dry MeCN, is added dropwise via syringe, and the mixture is stirred for 5 min under argon.

[0846] After the synthesis, the resin was treated with a 25% NH₃ aqueous solution (1 mL) for 12 h at 55° C. The mixture was cooled to room temperature and the resin was removed by membrane filtration. The filtrate was concentrated to dryness under reduced pressure. The residue was dissolved in H₂O (3 mL) and analyzed by RP-UPLC-MS with a linear gradient of acetonitrile (0-50%/30 min) in 0.1 M triethylammonium acetate buffer (pH 7.0) at 50° C. at a rate of 0.3 mL/min.

### Example Z-1

### (S)-1-Tritylpyrrolidin-2-carbaldehyde (1a)

[chemical structure]

[0848] Compound 1a was synthesized from L-proline according to the procedure described in the literature (Guga, P. Curr. Top. Med. Chem. 2007, 7, 695-713.).

### (R)-1-Tritylpyrrolidin-2-carbaldehyde (1b)

[chemical structure]

[0850] Compound 1b was synthesized from D-proline in a similar manner to compound 1a.

### (S)-2-(Methyldiphenylsiyl)-1-((S)-1-tritylpyrrolidin-2-yl)ethanol (2a)

[chemical structure]

[0852] To a solution of methyldiphenylsilylmethyl magnesium chloride in THF prepared from chloromethyldiphenylmethylsilane (4.02 g, 16.3 mmol) and magnesium (402 mg, 16.3 mmol) in THF (14 mL) was added 1a (2.79 g, 8.14 mmol) in THF (30 mL) solution with ice cooling. After stirring for 1.5 h with ice cooling, the mixture warmed to room temperature and continued stirring for 30 min. Saturated aqueous NH₄Cl (100 mL) was added to the reaction mixture at 0° C., and extraction was performed with diethylether (100 mL) for three times. The combined extract was dried over Na₂SO₄, filtered and concentrated under reduced pressure. The residue was chromatographed on silica gel afforded 2a as a colorless foam (3.91 g, 87%). ¹H NMR (300 MHz, CDCl₃) δ 7.48-7.08 (25H, m), 4.33-4.23 (1H, m), 3.16-2.89 (3H, m), 2.84 (1H, brs), 1.70-1.54 (1H, m), 1.35 (1H, dd, J=14.7, 6.3 Hz), 1.10 (1H, dd, J=14.7, 8.1 Hz), 1.18-1.05 (1H, m), 1.04-0.90 (1H, m), 0.34 (3H, s), −0.17-−0.36 (1H, m).

### (S)-2-(Methyldiphenylsilyl)-1-((S)-1-pyrrolidin-2-yl)ethanol (3a)

[chemical structure]

[0854] 2a (3.91 g, 7.06 mmol) was dissolved in 3% DCA in DCM (70 mL), and stirred for 10 min at room temperature. To the mixture, 1M NaOH (200 mL) was added, and extraction was performed with DCM (100 mL) for three times. The combined extract was dried over Na₂SO₄, filtered and concentrated under reduced pressure. The residue was chromatographed on silica gel afforded 3a as a light yellow oil (1.99 g, 90%). ¹H NMR (300 MHz, CDCl₃) δ 7.57-7.52 (5H, m), 7.38-7.33 (5H, m), 3.77 (1H, ddd, J=8.9, 5.4, 3.5 Hz), 3.01 (1H, dt, J=7.4, 3.6 Hz), 2.97-2.79 (2H, m), 2.27 (2H, brs), 1.76-1.53 (4H, m), 1.38 (1H, dd, J=15.0, 9.0 Hz), 1.24 (1H, dd, J=15.0, 5.4 Hz), 0.65 (3H, s); ¹³C NMR (100.4 MHz, CDCl₃) δ 137.4, 137.1, 134.6, 134.5, 129.1, 127.8, 69.5, 64.1, 47.0, 25.8, 24.0, 19.6, −3.4. MALDI TOF-MS m/z Calcd for C₁₉H₂₆NOSi [M+H]⁺ 312.18, found 312.06.

### Example Z-2

### (R)-2-(Methyldiphenylsilyl)-1-((R)-1-tritylpyrrolidin-2-yl)ethanol (2b)

[chemical structure]

[0856] Compound 2b was obtained by using 1b instead of 1a in a similar manner to compound 2a. ¹H NMR (300 MHz, CDCl₃) δ 7.48-7.12 (25H, m), 4.33-4.24 (1H, m), 3.16-2.89 (3H, m), 2.86 (1H, brs), 1.69-1.52 (1H, m), 1.35 (1H, dd, J=14.4, 6.0 Hz), 1.10 (1H, dd, J=14.4, 8.4 Hz), 1.18-1.05 (1H, m), 1.03-0.89 (1H, m), 0.33 (3H, s), −0.19-−0.39 (1H, m); ¹³C NMR (75.5 MHz, CDCl₃) δ 144.5, 137.5, 136.8, 134.6, 134.3, 129.8, 129.0, 127.8, 127.7, 127.4, 126.1, 77.9, 71.7, 65.1, 53.5, 25.0, 24.8, 19.6, −4.0. MALDI TOF-MS m/z Calcd for C₃₈H₄₀NOSi [M+H]⁺ 554.29, found 554.09.

### (R)-2-(Methyldiphenylsilyl)-1-((R)-1-pyrrolidin-2-yl)ethanol (3b)

[chemical structure]

[0858] Compound 3b was obtained by using 2b instead of 2a in a similar manner to compound 3a.

[0859] ¹H NMR (300 MHz, CDCl₃) δ 7.58-7.52 (5H, m), 7.38-7.33 (5H, m), 3.78 (1H, ddd, J=9.0, 5.1, 3.6 Hz), 3.00 (1H, dt, J=7.4, 3.3 Hz), 2.97-2.78 (2H, m), 2.19 (2H, brs), 1.76-1.53 (4H, m), 1.38 (1H, dd, J=14.6, 9.0 Hz), 1.24 (1H, dd, J=14.6, 5.1 Hz), 0.66 (3H, s); ¹³C NMR (75.5 MHz, CDCl₃) δ 137.5, 137.1, 134.5, 134.4, 129.0, 127.7, 69.2, 64.2, 46.9, 25.8, 24.0, 19.7, −3.4. MALDI TOF-MS m/z Calcd for C₁₉H₂₆NOSi [M+H]⁺ 312.18, found 312.09.

### Example Z-3

### (S)-2-(Trimethylsilyl)-1-(S)-1-tritylpyrrolidin-2-yl)ethanol (4a)

[chemical structure]

[0861] Compound 4a was obtained by using “chloromethyltrimethylsilane” instead of “chloromethyldiphenylmethylsilane” in a similar manner to compound 2a. ¹H NMR (300 MHz, CDCl₃) δ 7.58-7.51 (5H, m), 7.31-7.14 (10H, m), 4.13 (1H, dt, J=7.5, 3.0 Hz), 3.39-3.31 (1H, m), 3.20-2.99 (2H, m), 2.84 (1H, s), 1.74-1.57 (1H, m), 1.29-1.10 (2H, m), 0.74 (1H, dd, J=14.4, 7.2 Hz), 0.46 (1H, dd, J=14.4, 7.2 Hz), −0.15 (9H, s). MALDI TOF-MS m/z Calcd for C₂₈H₃₆NOSi [M+H]⁺ 430.26, found 430.09.

### (S)-2-(Trimethylsilyl)-1-((S)-1-pyrrolidin-2-yl)ethanol (5a)

[chemical structure]

[0863] Compound 5a was obtained by using 4a instead of 2a in a similar manner to compound 3a. ¹H NMR (300 MHz, CDCl₃) δ 3.76 (1H, ddd, J=8.8, 5.7, 3.3 Hz), 3.08 (1H, dt, J=7.8, 3.3 Hz), 3.02-2.87 (2H, m), 2.48 (2H, brs), 1.81-1.58 (4H, m), 0.83 (1H, dd, J=14.7, 8.7 Hz), 0.68 (1H, dd, J=14.7, 6.0 Hz), 0.05 (9H, s); ¹³C NMR (75.5 MHz, CDCl₃) δ 69.6, 64.3, 46.9, 25.8, 23.9, 22.0, −0.8. MALDI TOF-MS m/z Calcd for C₉H₂₂NOSi [M+H]⁺ 188.15, found 188.00.

### Example Z-5

### (R)-2,2-Diphenyl-1-((S)-1-tritylpyrrolidin-2-yl)ethanol (6a)

[chemical structure]

[0865] To a solution of diphenylmethane (6.7 mL, 40 mmol) in anhydrous THF (36 mL), n-BuLi (1.67M solution of Hexane, 24 mL, 40 mmol) was added dropwise at room temperature and stirred for 1 h. To the mixture, 1a (3.41 g, 10 mmol), which was dried by repeated coevaporations with toluene, in anhydrous THF (40 mL) was slowly added at 0° C., and continued stirring for 45 min. A saturated NH₄Cl aqueous solution (100 mL) and Et₂O (100 mL) were then added, and the organic layer was separated and the aqueous layer was extracted with Et₂O (2×100 mL). The organic layer were combined, dried over Na₂SO₄, filtered and concentrated under reduced pressure. The residue was purified by chromatography on silica gel to afford 6a (1.41 g, 28%) as white foam.

### (R)-2,2-Diphenyl-1-((S)-pyrrolidin-2-yl)ethanol (7a)

[chemical structure]

[0867] 6a (650 mg, 1.27 mmol) was dissolved in 3% DCA in DCM (13 mL), and stirred for 10 min at room temperature. To the mixture, IM NaOH (40 mL) was added, and extraction was performed with DCM (30 mL) for three times. The combined extract was dried over Na₂SO₄, filtered and concentrated under reduced pressure. The residue was chromatographed on silica gel afforded 7a as a light yellow oil (316 mg, 93%). ¹H NMR (300 MHz, CDCl₃) δ 7.44-7.38 (2H, m), 7.33-7.14 (8H, m), 4.46 (1H, dd, J=9.9, 3.3 Hz), 3.91 (1H, d, J=9.9 Hz), 3.02-2.88 (2H, m), 2.81-2.69 (1H, m), 2.52 (2H, brs), 1.88-1.56 (4H, m); ¹³C NMR (75.5 MHz, CDCl₃) δ 142.3, 142.0, 128.6, 128.5, 128.4, 128.2, 126.5, 126.4, 73.5, 60.1, 55.8, 46.6, 25.8, 23.4. MALDI TOF-MS m/z Calcd for C₁₈H₂₂NO [M+H]⁺ 268.17, found 268.06.

### Example Z-6

### (S)-2,2-Diphenyl-1-((R)-1-tritylpyrrolidin-2-yl)ethanol (6b)

[chemical structure]

[0869] Compound 6b was obtained by using 1b instead of 1a in a similar manner to compound 6a. ¹H NMR (300 MHz, CDCl₃) δ 7.44-7.37 (6H, m), 7.30-7.01 (17H, m), 6.66-6.61 (2H, m), 4.80 (1H, d, J=10.8 Hz), 3.63 (1H, d, J=10.8 Hz), 3.36-3.28 (1H, m), 3.22-3.09 (1H, m), 3.01-2.89 (1H, m), 2.66 (1H, s), 1.90-1.75 (1H, m), 1.29-1.04 (2H, m), 0.00-−0.19 (1H, m); ¹³C NMR (75.5 MHz, CDCl₃) δ 144.2, 142.9, 141.6, 130.0, 128.5, 128.4, 127.9, 127.8, 127.4, 126.4, 126.2, 77.9, 75.9, 61.9, 55.4, 53.4, 24.7, 24.5. MALDI TOF-MS m/z Calcd for C₃₇H₃₆NO [M+H]⁺ 510.28, found 510.11.

### (S)-2,2-Diphenyl-1-((R)-pyrrolidin-2-yl)ethanol (7b)

[chemical structure]

[0871] Compound 7b was obtained by using 6b instead of 6a in a similar manner to compound 7a. ¹H NMR (300 MHz, CDCl₃) δ 7.45-7.14 (10H, m), 4.45 (1H, dd, J=9.9, 3.3 Hz), 3.91 (1H, d, J=9.9 Hz), 3.00-2.89 (2H, m), 2.82-2.71 (1H, m), 2.40 (2H, brs), 1.87-1.55 (4H, m); ¹³C NMR (75.5 MHz, CDCl₃) δ 142.3, 142.0, 128.5, 128.3, 128.1, 126.3, 126.2, 73.4, 60.1, 55.9, 46.5, 25.8, 23.5. MALDI TOF-MS m/z Calcd for C₁₈H₂₂NO [M+H]⁺ 268.17, found 268.03.

### Example Z-7

### (R)-2-(4-Nitrophenyl)-1-((S)-1-tritylpyrrolidin-2-yl)ethanol (8a)

[chemical structure]

[0873] Compound 8a was obtained by using “4-nitrobenzylchloride” instead of “diphenylmethane” in a similar manner to compound 6a. ¹H NMR (300 MHz, CDCl₃) δ 8.09-8.03 (2H, m), 7.49-7.43 (6H, m), 7.28-7.09 (11H, m), 4.23 (1H, ddd, J=8.3, 5.6, 3.0 Hz), 3.43-3.33 (1H, m), 3.23-3.11 (1H, m), 3.07-2.96 (1H, m), 2.83 (1H, brs), 2.74 (1H, dd, J=13.8, 8.4 Hz), 2.49 (1H, dd, J=13.8, 5.1 Hz), 1.83-1.67 (1H, m), 1.41-1.17 (2H, m), 0.27-0.08 (1H, m); ¹³C NMR (75.5 MHz, CDCl₃) δ 147.3, 146.3, 144.3, 129.8, 129.6, 127.5, 126.3, 123.4, 77.9, 74.8, 63.5, 53.2, 39.5, 25.0, 24.9. MALDI TOF-MS m/z Calcd for C₃₁H₃₁N₂O₃ [M+H]⁺ 479.23, found 479.08.

### (R)-2-(4-Nitrophenyl)-1-((S)pyrrolidin-2-yl)ethanol 9a)

[chemical structure]

[0875] Compound 9a was obtained by using 8a instead of 6a in a similar manner to compound 7a. ¹H NMR (300 MHz, CDCl₃) δ 8.15 (2H, d, J=8.7 Hz), 7.42 (2H, d, J=8.7 Hz), 3.86-3.79 (1H, m), 3.16-3.07 (1H, m), 2.99-2.68 (6H, m), 1.84-1.68 (4H, m); ¹³C NMR (75.5 MHz, CDCl₃) δ 147.4, 146.2, 129.9, 123.2, 72.4, 62.0, 46.6, 40.4, 25.7, 24.4. MALDI TOF-MS m/z Calcd for C₁₂H₁₇N₂O₃ [M+H]⁺ 237.12, found 237.01.

### Example Z-8

### (S)-2-(4-Nitrophenyl)-1-(R)-1-tritylpyrrolidin-2-yl)ethanol (8b)

[chemical structure]

[0877] Compound 8b was obtained by using 1b instead of 1a in a similar manner to compound 8a. ¹H NMR (300 MHz, CDCl₃) δ 8.09-8.04 (2H, m), 7.49-7.43 (6H, m), 7.28-7.09 (11H, m), 4.22 (1H, ddd, J=8.4, 5.6, 3.0 Hz), 3.43-3.33 (1H, m), 3.24-3.10 (1H, m), 3.08-2.94 (1H, m), 2.81 (1H, brs), 2.75 (1H, dd, J=14.0, 8.1 Hz), 2.49 (1H, dd, J=14.0, 5.1 Hz), 1.81-1.67 (1H, m), 1.40-1.16 (2H, m), 0.26-0.09 (1H, m); ¹³C NMR (75.5 MHz, CDCl₃) δ 147.3, 144.3, 129.8, 129.6, 129.4, 126.3, 123.5, 77.9, 74.8, 63.5, 53.2, 39.5, 25.0, 24.9. MALDI TOF-MS m/z Calcd for C₃₁H₃₁N₂O₃ [M+H]⁺ 479.23, found 479.08.

### (S)-2-(4-Nitrophenyl)-1-((R)-pyrrolidin-2-yl)ethanol (9b)

[chemical structure]

[0879] Compound 9b was obtained by using 8b instead of 8a in a similar manner to compound 9a. ¹H NMR (300 MHz, CDCl₃) δ 8.19-8.13 (2H, m), 7.45-7.39 (2H, m), 3.83 (1H, ddd, J=7.7, 5.4, 3.9 Hz), 3.14 (1H, dt, J=7.7, 3.9 Hz), 3.01-2.87 (2H, m), 2.83 (1H, d, J=3.3 Hz), 2.81 (1H, s), 2.62 (2H, brs), 1.79-1.72 (4H, m); ¹³C NMR (75.5 MHz, CDCl₃) δ 147.3, 146.5, 130.0, 123.5, 72.7, 61.7, 46.7, 40.1, 25.8, 24.2. MALDI TOF-MS m/z Calcd for C₁₂H₁₇N₂O₃ [M+H]⁺ 237.12, found 237.02.

### Example Z-9

### (R)-(9H-Fluoren-9-yl)((S)-1-tritylpyrrolidin-2-yl)methanol (10a)

[chemical structure]

[0881] Compound 10a was obtained by using “fluorene” instead of “diphenylmethane” in a similar manner to compound 6a. ¹H NMR (300 MHz, CDCl₃) δ 7.70 (1H, d, J=7.5 Hz), 7.66 (1H, d, J=7.8 Hz), 7.55 (2H, d, J=7.5 Hz), 7.44-7.09 (18H, m), 6.87-6.62 (1H, m), 4.55-4.48 (1H, m), 4.06 (1H, d, J=7.5 Hz), 3.43-3.34 (1H, m), 3.18-3.06 (1H, m), 2.98-2.88 (1H, m), 2.85 (1H, brs), 1.42-1.24 (1H, m), 1.18-1.04 (1H, m), 0.53-0.39 (1H, m), −0.02-−0.20 (1H, m); MALDI TOF-MS m/z Calcd for C₃₇H₃₄NO [M+H]⁺ 508.26, found 508.12.

### (R)-(9H-Fluororen-9-yl)((S)-pyrrolidin-2-yl)methanol (11a)

[chemical structure]

[0883] Compound 11a was obtained by using 10a instead of 6a in a similar manner to compound 7a. ¹H NMR (300 MHz, CDCl₃) δ 7.76 (2H, d, J=7.5 Hz), 7.68 (2H, t, J=8.0 Hz), 7.43-7.35 (2H, m), 7.34-7.25 (2H, m), 4.28 (1H, d, J=6.3 Hz), 4.03 (1H, dd, J=6.5, 4.2 Hz), 3.19-3.11 (1H, m), 2.97-2.88 (1H, m), 2.86-2.76 (1H, m), 2.02 (2H, brs), 1.77-1.53 (3H, m), 1.38-1.23 (1H, m); MALDI TOF-MS m/z Calcd for C₁₈H₂ONO [M+H]⁺ 266.15, found 266.04.

### (S)-2-Tosyl-1-((S)-1-tritylpyrrolidin-2-yl)ethanol (12a′)

[chemical structure]

[0885] Compound 12a′ was obtained by using “chloromethyl p-tolyl sulfone” instead of “chloromethyldiphenylmethylsilane” in a similar manner to compound 2a.

[0886] ¹H NMR (600 MHz, CDCl₃) δ 7.66 (2H, d, J=8.4 Hz), 7.48-7.44 (6H, m), 7.35 (2H, d, J=7.2 Hz), 7.21-7.13 (9H, m), 4.39-4.36 (1H, m), 3.33 (1H, s), 3.24-3.20 (1H, m), 3.19-3.10 (2H, m), 2.98-2.92 (2H, m), 2.49 (3H, s), 1.55-1.49 (1H, m), 1.33-1.26 (1H, m), 1.12-1.04 (1H, m), 0.22-0.14 (1H, m); ¹³C NMR (150.9 MHz, CDCl₃) δ 144.6, 144.5, 136.3, 129.9, 129.5, 128.1, 127.5, 126.2, 78.0, 69.1, 63.9, 60.2, 52.6, 25.5, 24.7, 21.7.

### (S)-2-Tosyl-1-((S)-1-tritylpyrrolidin-2-yl)ethanol (13a′)

[chemical structure]

[0888] Compound 13a′ was obtained by using 12a′ instead of 2a in a similar manner to compound 3a.

[0889] ¹H NMR (600 MHz, CDCl₃) δ 7.82 (2H, d, J=8.4 Hz), 7.37 (2H, d, J=8.4 Hz), 4.01 (1H, ddd, J=12.0, 5.1, 3.0 Hz), 3.32 (1H, dd, J=14.4, 3.0 Hz), 3.25 (1H, dd, J=14.4, 9.0 Hz), 3.16 (1H, dt, J=7.8, 5.1 Hz), 2.90-2.82 (2H, m), 2.46 (3H, s), 2.04 (2H, brs), 1.78-1.63 (3H, m), 1.62-1.55 (1H, m); ¹³C NMR (150.9 MHz, CDCl₃) δ 144.5, 136.7, 129.7, 127.7, 67.4, 61.8, 60.1, 46.7, 25.7, 21.4. MALDI TOF-MS m/z Calcd for C₁₃H₂₀NO₃S [M+H]⁺ 270.12, found 270.04.

### (R)-2-Tosyl-1-((R)-1-tritylpyrrolidin-2-yl)ethanol (12b′)

[chemical structure]

[0891] Compound 12b′ was obtained by using 1b instead of 1a in a similar manner to compound 12a′.

[0892] ¹H NMR (600 MHz, CDCl₃) δ 7.66 (2H, d, J=8.4 Hz), 7.47-7.44 (6H, m), 7.35 (2H, d, J=7.8 Hz), 7.21-7.13 (9H, m), 4.37 (1H, dt, J=8.6, 2.4 Hz), 3.33 (1H, s), 3.23-3.20 (1H, m), 3.19-3.12 (2H, m), 2.98-2.92 (2H, m), 2.49 (3H, s), 1.56-1.49 (1H, m), 1.32-1.26 (1H, m), 1.11-1.03 (1H, m), 0.23-0.15 (1H, m); ¹³C NMR (150.9 MHz, CDCl₃) δ 144.6, 144.5, 136.3, 129.9, 129.6, 128.1, 127.6, 126.2, 78.0, 69.1, 63.9, 60.2, 52.6, 25.5, 24.7, 21.7.

### (R)-2-Tosyl-1-((R)-1-tritylpyrrolidin-2-yl)ethanol (13b′)

[chemical structure]

[0894] Compound 13b′ was obtained by using 12b′ instead of 12a′ in a similar manner to compound 13a′.

[0895] ¹H NMR (600 MHz, CDCl₃) δ 7.82 (2H, d, J=8.4 Hz), 7.37 (2H, d, J=8.4 Hz), 4.01 (1H, ddd, J=9.0, 5.1, 3.0 Hz), 3.32 (1H, dd, J=14.4, 3.0 Hz), 3.25 (1H, dd, J=14.4, 9.0 Hz), 3.17 (1H, dt, J=7.2, 5.1 Hz), 2.89-2.83 (2H, m), 2.46 (3H, s), 2.04 (2H, brs), 1.79-1.64 (3H, m), 1.62-1.55 (1H, m); ¹³C NMR (150.9 MHz, CDCl₃) δ 144.8, 136.6, 129.8, 127.9, 67.7, 61.8, 60.1, 46.8, 25.9, 25.8, 21.6. MALDI TOF-MS n/z Calcd for C₃H₂₀NO₃S [M+H]⁺ 270.12, found 270.05.

### Example Z-10

### Oxazaphospholidine Monomer 12a.

[chemical structure]

[0897] 3a (560 mg, 1.80 mmol) were dried by repeated coevaporations with dry toluene and dissolved in dry diethylether (0.90 mL) under argon. N-Methylmorpholine (400 micro L, 3.60 mmol) was added to the solution, and the resultant solution was added dropwise to a solution of PCl₃ (160 micro L, 1.80 mmol) in dry diethylether (0.90 mL) at 0° C. under argon with stirring. The mixture was then allowed to warm to room temperature and stirred for 30 min. The resultant N-methylmorpholine hydrochloride was removed by filtration under nitrogen, and the filtrate was concentrated to dryness under reduced pressure to afford crude 2-chloro-1,3,2-oxazaphospholidine derivative. The crude materials were dissolved in freshly distilled THF (3.6 mL) to make 0.5 M solutions, which were used to synthesize the nucleoside 3′-O-oxazaphospholidines without further purification.

[0898] 5′-O-(DMTr)-2-N-(phenoxyacetyl)-6-O-(cyanoethyl)guanosine (636 mg, 0.84 mmol) was dried by repeated coevaporations with dry toluene, and dissolved in freshly distilled THF (2.5 mL) under argon. Et₃N (0.58 mL, 4.2 mmol) was added, and the mixture was cooled to −78° C. A 0.5 M solution of the corresponding crude 2-chloro-1,3,2-oxazaphospholidine derivative in freshly distilled THF (3.6 mL, 1.80 mmol) was added dropwise via a syringe, and the mixture was stirred for 15 min at room temperature. A saturated NaHCO₃aqueous solution (70 mL) and CHCl₃ (70 mL) were then added, and the organic layer was separated and washed with saturated NaHCO₃aqueous solutions (2×70 mL). The combined aqueous layers were back-extracted with CHCl₃ (70 mL). The organic layers were combined, dried over Na₂SO₄, filtered and concentrated under reduced pressure. The residue was purified by chromatography on silica gel to afford 12a (829 mg, 90%) as a white foam. ¹H NMR (300 MHz, CDCl₃) δ 8.77 (1H, brs), 7.99 (1H, s), 7.54-6.98 (24H, m), 6.81-6.73 (4H, m), 6.35 (1H, dd, J=8.0, 6.3 Hz), 4.89-4.73 (4H, m), 4.68 (2H, brs), 4.05-3.98 (1H, m), 3.75 (6H, s), 3.62-3.46 (1H, m), 3.41-3.20 (3H, m), 3.18-3.04 (1H, m), 3.08 (2H, t, J=6.6 Hz), 2.58-2.36 (2H, m), 1.94-1.59 (2H, m), 1.56 (1H, dd, J=15.0, 8.7 Hz), 1.43 (1H, dd, J=15.0, 5.7 Hz), 1.33-1.16 (2H, m), 0.62 (3H, s); ³¹P NMR (121.5 MHz, CDCl₃) δ 153.5 (1P, s).

### Example Z-11

### Oxazaphospholidine Monomer 12b.

[chemical structure]

[0900] Compound 12b was obtained by using 3b instead of 3a in a similar manner to compound 12a. ¹H NMR (300 MHz, CDCl₃) δ 8.80 (1H, brs), 7.96 (1H, s), 7.54-6.96 (24H, m), 6.79-6.71 (4H, m), 6.19 (1H, t, J=6.6 Hz), 4.90-4.73 (4H, m), 4.66 (2H, brs), 4.16-4.08 (1H, m), 3.76 (6H, s), 3.60-3.36 (2H, m), 3.29 (1H, d, J=3.9 Hz), 3.27-3.12 (2H, m), 3.09 (2H, t, J=6.6 Hz), 2.59-2.46 (1H, m), 2.07-1.97 (1H, m), 1.94-1.41 (5H, m), 1.36-1.18 (1H, m), 0.65 (3H, s); ³¹P NMR (121.5 MHz, CDCl₃) δ 157.1 (1P, s).

### Example Z-12

### Oxazaphospholidine Monomer 13a.

[chemical structure]

[0902] Compound 13a was obtained by using “5′-O-(DMTr)thymidine” instead of “5′-O-(DMTr)-2-N-(phenoxyacetyl)-6-O-(cyanoethyl)guanosine” in a similar manner to compound 12a. ¹H NMR (300 MHz, CDCl₃) δ 7.58-7.23 (21H, m), 6.86-6.79 (4H, m), 6.35 (1H, dd, J=8.1, 5.7 Hz), 4.79-4.67 (2H, m), 3.83-3.78 (1H, m), 3.78 (6H, s), 3.59-3.43 (1H, m), 3.34 (1H, dd, J=10.5, 2.4 Hz), 3.35-3.24 (1H, m), 3.20 (1H, dd, J=10.5, 2.4 Hz), 3.16-3.02 (1H, m), 2.36-2.26 (1H, m), 2.15-2.02 (1H, m), 1.92-1.77 (1H, m), 1.74-1.59 (1H, m), 1.52 (1H, dd, J=14.7, 9.0 Hz), 1.40 (3H, s), 1.45-1.15 (3H, m), 0.60 (3H, s); ³¹P NMR (121.5 MHz, CDCl₃) δ 153.7 (1P, s).

### Example Z-13

### Oxazaphospholidine Monomer 13b.

[chemical structure]

[0904] Compound 13b was obtained by using 3b instead of 3a in a similar manner to compound 13a. ¹H NMR (300 MHz, CDCl₃) δ 8.46 (1H, brs), 7.59-7.20 (20H, m), 6.86-6.79 (4H, m), 6.26 (1H, t, J=6.8 Hz), 4.78-4.65 (2H, m), 4.01-3.95 (1H, m), 3.78 (6H, s), 3.55-3.40 (1H, m), 3.42 (1H, dd, J=10.5, 2.7 Hz), 3.40-3.28 (1H, m), 3.22 (1H, dd, J=10.5, 3.0 Hz), 3.19-3.06 (1H, m), 2.16-1.95 (2H, m), 1.90-1.54 (3H, m), 1.49-1.35 (1H, m), 1.43 (3H, s), 1.34-1.17 (2H, m), 0.67 (3H, s); ³¹P NMR (121.5 MHz, CDCl₃) δ 156.2 (1P, s). Oligos were synthesized using the above compound 13b by the general method disclosed above.

### Example Z-14

### Oxazaphospholidine Monomer 14a.

[chemical structure]

[0906] Compound 14a was obtained by using “5′-O-(DMTr)-4-N-(isobutyryl)cytidine” instead of “5′-O-(DMTr)-2-N-(phenoxyacetyl)-6-O-(cyanoethyl)guanosine” in a similar manner to compound 12a. ¹H NMR (300 MHz, CDCl₃) δ 8.33 (1H, brs), 8.17 (1H, d, J=7.5 Hz), 7.52-7.22 (19H, m), 7.07 (1H, d, J=7.5 Hz), 6.88-6.81 (4H, m), 6.20 (1H, t, J=6.2 Hz), 4.81-4.64 (2H, m), 3.93-3.87 (1H, m), 3.79 (6H, s), 3.59-3.43 (1H, m), 3.39-3.29 (3H, m), 3.16-3.02 (1H, m), 2.69-2.52 (2H, m), 2.12-2.00 (1H, m), 1.91-1.50 (3H, m), 1.47-1.32 (2H, m), 1.27-1.16 (7H, m), 0.60 (3H, s); ³¹P NMR (121.5 MHz, CDCl₃) δ 154.8 (1P, s).

### Example Z-16

### Oxazaphospholidine Monomer 14b.

[chemical structure]

[0908] Compound 14b was obtained by using 3b instead of 3a in a similar manner to compound 14a. ¹H NMR (300 MHz, CDCl₃) δ 8.33 (1H, d, J=7.5 Hz), 8.23 (1H, brs), 7.57-7.22 (19H, m), 7.12 (1H, d, J=7.5 Hz), 6.88-6.81 (4H, m), 6.15 (1H, dd, J=6.6, 4.2 Hz), 4.82-4.63 (2H, m), 4.03-3.97 (1H, m), 3.80 (6H, s), 3.55-3.26 (4H, m), 3.19-3.05 (1H, m), 2.59 (1H, quintet, J=6.9 Hz), 2.39-2.27 (1H, m), 2.21-2.10 (1H, m), 1.90-1.56 (3H, m), 1.50-1.32 (2H, m), 1.26-1.17 (7H, m), 0.66 (3H, s); ³¹P NMR (121.5 MHz, CDCl₃) δ 157.2 (1P, s).

### Example Z-17

### Oxazaphospholidine Monomer 15a.

[chemical structure]

[0910] Compound 15a was obtained by using “5′-O-(DMTr)-6-N-(benzoyl)adenosine” instead of “5′-O-(DMTr)-2-N-(phenoxyacetyl)-6-O-(cyanoethyl)guanosine” in a similar manner to compound 12a.

[0911] ¹H NMR (600 MHz, CDCl₃) δ 8.71 (1H, s), 8.12 (1H, s), 8.04 (2H, d, J=7.8 Hz), 7.62-7.15 (23H, m), 6.80-6.75 (4H, m), 6.37 (1H, dd, J=7.8, 6.0 Hz), 4.94-4.88 (1H, m), 4.80 (1H, ddd, J=12.0, 6.0, 5.4 Hz), 4.07-4.04 (1H, m), 3.76 (6H, s), 3.58-3.49 (1H, m), 3.41-3.34 (1H, m), 3.33 (1H, dd, J=10.8, 4.8 Hz), 3.25 (1H, dd, J=10.8, 4.8 Hz), 3.13-3.06 (1H, m), 2.66-2.58 (1H, m), 2.40-2.35 (1H, m), 1.91-1.84 (1H, m), 1.73-1.66 (1H, m), 1.56 (1H, dd, J=15.0, 9.0 Hz), 1.44 (1H, dd, J=15.0, 5.4 Hz), 1.47-1.41 (1H, m), 1.30-1.23 (1H, m), 0.63 (3H, s); ³¹P NMR (243.0 MHz, CDCl₃) δ 151.8 (1P, s).

### Example Z-18

### Oxazaphospholidine Monomer 15b.

[chemical structure]

[0913] Compound 15b was obtained by using 3b instead of 3a in a similar manner to compound 15a. ¹H NMR (300 MHz, CDCl₃) δ 9.06 (1H, brs), 8.76 (1H, s), 8.12 (1H, s), 8.07-7.99 (2H, m), 7.64-7.14 (22H, m), 6.83-6.75 (4H, m), 6.25 (1H, t, J=6.6 Hz), 4.86-4.75 (2H, m), 4.20-4.15 (1H, m), 3.77 (6H, s), 3.61-3.38 (2H, m), 3.36 (1H, dd, J=10.2, 4.2 Hz), 3.27 (1H, dd, J=10.2, 4.2 Hz), 3.27-3.13 (1H, m), 2.71-2.59 (1H, m), 2.12-2.01 (1H, m), 1.94-1.42 (5H, m), 1.36-1.20 (1H, m), 0.67 (3H, s)); ³¹P NMR (121.5 MHz, CDCl₃) δ 157.3 (1P, s).

### Example Z-19

### Oxazaphospholidine Monomer 16a.

[chemical structure]

[0915] Compound 16a was obtained by using 7a instead of 3a in a similar manner to compound 13a. ¹H NMR (300 MHz, CDCl₃) δ 7.57 (1H, d, J=0.9 Hz), 7.37-6.94 (20H, m), 6.87-6.78 (4H, m), 6.48 (1H, dd, J=8.6, 5.7 Hz), 5.42 (1H, dd, J=11.0, 5.1 Hz), 4.81-4.71 (1H, m), 4.02 (1H, d, J=11.0 Hz), 3.83 (1H, d, J=2.1 Hz), 3.79 (6H, s), 3.61-3.41 (2H, m), 3.24-3.09 (1H, m), 3.16 (1H, dd, J=10.8, 2.4 Hz), 3.02 (1H, dd, J=10.8, 2.4 Hz), 2.54-2.44 (1H, m), 2.34-2.22 (1H, m), 1.94-1.79 (1H, m), 1.74-1.56 (1H, m), 1.38 (3H, s), 1.38-1.28 (2H, m); ³¹P NMR (121.5 MHz, CDCl₃) δ 160.9 (1P, s).

### Example Z-20

### Oxazaphospholidine Monomer 16b.

[chemical structure]

[0917] Compound 16b was obtained by using 3b instead of 3a in a similar manner to compound 16a. ¹H NMR (300 MHz, CDCl₃) δ 7.57 (1H, d, J=1.5 Hz), 7.43-7.11 (20H, m), 6.85-6.78 (4H, m), 6.48 (1H, dd, J=7.5, 5.7 Hz), 5.58 (1H, dd, J=11.4, 5.1 Hz), 4.82-4.73 (1H, m), 4.17-4.02 (2H, m), 3.78 (6H, s), 3.56-3.40 (3H, m), 3.32 (1H, dd, J=10.7, 2.4 Hz), 3.22-3.07 (1H, m), 2.26-2.04 (2H, m), 1.95-1.81 (1H, m), 1.74-1.56 (1H, m), 1.40 (3H, d, J=1.5 Hz), 1.44-1.34 (2H, m); ³¹P NMR (121.5 MHz, CDCl₃) δ 162.2 (1P, s).

### Example Z-21

### Oxazaphospholidine Monomer 17a.

[chemical structure]

[0919] Compound 17a was obtained by using 9a instead of 3a in a similar manner to compound 13a. ¹H NMR (300 MHz, CDCl₃) δ 9.22 (1H, brs), 8.05-7.99 (2H, m), 7.52 (1H, d, J=1.2 Hz), 7.41-7.19 (11H, m), 6.87-6.79 (4H, m), 6.37 (1H, dd, J=8.4, 5.7 Hz), 4.88-4.75 (2H, m), 3.86-3.80 (1H, m), 3.79 (6H, d, J=1.2 Hz), 3.64-3.49 (2H, m), 3.27-3.12 (3H, m), 2.97 (2H, d, J=6.6 Hz), 2.51-2.41 (1H, m), 2.33-2.20 (1H, m), 2.03-1.75 (2H, m), 1.72-1.59 (1H, m), 1.46-1.36 (1H, m), 1.40 (3H, s); ³¹P NMR (121.5 MHz, CDCl₃) δ 157.5 (1P, s).

### Example Z-22

### Oxazaphospholidine Monomer 17b.

[chemical structure]

[0921] Compound 17b was obtained by using 9b instead of 9a in a similar manner to compound 17a. ¹H NMR (300 MHz, CDCl₃) δ 8.67 (1H, brs), 8.18-8.11 (2H, m), 7.57 (1H, d, J=1.2 Hz), 7.47-7.22 (11H, m), 6.86-6.79 (4H, m), 6.29 (1H, t, J=6.6 Hz), 4.87 (1H, dt, J=7.5, 5.7 Hz), 4.80-4.72 (1H, m), 4.11-4.05 (1H, m), 3.79 (6H, s), 3.67-3.47 (2H, m), 3.43 (1H, dd, J=10.8, 2.7 Hz), 3.27 (1H, dd, J=10.8, 2.4 Hz), 3.25-3.13 (1H, m), 3.07-2.99 (2H, m), 2.19-2.12 (2H, m), 2.03-1.62 (3H, m), 1.46-1.30 (1H, m), 1.41 (3H, s); ³¹P NMR (121.5 MHz, CDCl₃) δ 158.1 (1P, s).

### Example Z-23

### Oxazaphospholidine Monomer 18a.

[chemical structure]

[0923] Compound 18a was obtained by using “5′-O-(DMTr)-2′-O-TOM-6-N-(acetyl)adenosine” instead of “5′-O-(DMTr)-2-N-(phenoxyacetyl)-6-O-(cyanoethyl)guanosine” in a similar manner to compound 12a. ¹H NMR (300 MHz, CDCl₃) δ 8.82 (1H, brs), 8.49 (1H, s), 8.10 (1H, s), 7.58-7.17 (19H, m), 6.83-6.73 (4H, m), 6.11 (1H, d, J=6.6 Hz), 5.15 (1H, dd, J=6.6, 5.4 Hz), 4.98-4.77 (4H, m), 4.18-4.11 (1H, m), 3.76 (6H, s), 3.59-3.25 (4H, m), 3.16-3.02 (1H, m), 2.62 (3H, s), 1.91-1.53 (3H, m), 1.49-1.18 (3H, m), 0.96-0.80 (3H, m), 0.90 (18H, s), 0.62 (3H, s); ³¹P NMR (121.5 MHz, CDCl₃) δ 156.7 (1P, s).

### Example Z-24

### Oxazaphospholidine Monomer 18b.

[chemical structure]

[0925] Compound 18b was obtained by using 3b instead of 3a in a similar manner to compound 18a. ¹H NMR (300 MHz, CDCl₃) δ 8.56 (1H, brs), 8.55 (1H, s), 8.13 (1H, s), 7.57-7.17 (19H, m), 6.82-6.73 (4H, m), 6.16 (1H, d, J=5.7 Hz), 5.06 (1H, t, J=5.6 Hz), 4.93 (1H, d, J=5.1 Hz), 4.83 (1H, d, J=5.1 Hz), 4.81-4.69 (2H, m), 4.27-4.19 (1H, m), 3.76 (6H, s), 3.55-3.40 (2H, m), 3.33-3.16 (2H, m), 3.12-2.97 (1H, m), 2.63 (3H, s), 1.88-1.52 (3H, m), 1.45-1.16 (3H, m), 0.91-0.79 (3H, m), 0.86 (18H, s), 0.64 (3H, s); ³¹P NMR (121.5 MHz, CDCl₃) δ 154.8 (1P, s).

### Example Z-25

### Oxazaphospholidine Monomer 19a.

[chemical structure]

[0927] Compound 19a was obtained by using “5′-O-(DMTr)-2′-O-(methyl)uridine” instead of “5′-O-(DMTr)-2-N-(phenoxyacetyl)-6-O-(cyanoethyl)guanosine” in a similar manner to compound 12a. ¹H NMR (300 MHz, CDCl₃) δ 7.91 (1H, d, J=7.8 Hz), 7.58-7.20 (19H, m), 6.88-6.80 (4H, m), 5.96 (1H, d, J=3.3 Hz), 5.19 (1H, d, J=7.8 Hz), 4.88-4.78 (1H, m), 4.66-4.57 (1H, m), 4.03-3.95 (1H, m), 3.90-3.74 (1H, m), 3.78 (6H, s), 3.77-3.71 (1H, m), 3.58-3.29 (2H, m), 3.45 (3H, s), 3.13-2.82 (2H, m), 1.88-1.53 (3H, m), 1.49-1.16 (3H, m), 0.60 (3H, s); ³¹P NMR (121.5 MHz, CDCl₃) δ 155.3 (1P, s).

### Example Z-26

### Oxazaphospholidine Monomer 19b.

[chemical structure]

[0929] Compound 19b was obtained by using 3b instead of 3a in a similar manner to compound 19a. ¹H NMR (300 MHz, CDCl₃) δ 8.10 (1H, d, J=8.4 Hz), 7.58-7.20 (19H, m), 6.87-6.79 (4H, m), 5.89 (1H, d, J=1.5 Hz), 5.21 (1H, d, J=8.4 Hz), 4.92-4.82 (1H, m), 4.73-4.63 (1H, m), 4.15-4.08 (1H, m), 3.89-3.73 (1H, m), 3.78 (6H, s), 3.66-3.62 (1H, m), 3.57-3.27 (2H, m), 3.30 (3H, s), 3.17-2.82 (2H, m), 1.89-1.55 (3H, m), 1.55-1.40 (1H, m), 1.35-1.15 (2H, m), 0.66 (3H, s); ³¹P NMR (121.5 MHz, CDCl₃) δ 157.5 (1P, s).

### Example Z-27

### Oxazaphospholidine Monomer 20a.

[chemical structure]

[0931] Compound 20a was obtained by using “5′-O-(DMTr)-2′-deoxy-2′-fluorouridine” instead of “5′-O-(DMTr)-2-N-(phenoxyacetyl)-6-O-(cyanoethyl)guanosine” in a similar manner to compound 12a. ¹H NMR (300 MHz, CDCl₃) δ 7.85 (1H, d, J=8.1 Hz), 7.58-7.20 (19H, m), 6.87-6.79 (4H, m), 5.98 (1H, d, J=16.5 Hz), 5.23 (1H, d, J=8.1 Hz), 4.86-4.61 (3H, m), 3.99 (1H, d, J=6.9 Hz), 3.76 (6H, d, J=3.0 Hz), 3.56-3.34 (4H, m), 3.10-2.96 (1H, m), 1.88-1.74 (1H, m), 1.72-1.52 (2H, m), 1.48-1.16 (3H, m), 0.61 (3H, s); ³¹P NMR (121.5 MHz, CDCl₃) δ 154.3 (1P, d, J=8.9 Hz).

### Example Z-28

### Oxazaphospholidine Monomer 20b.

[chemical structure]

[0933] Compound 20b was obtained by using 3b instead of 3a in a similar manner to compound 20a. ¹H NMR (300 MHz, CDCl₃) δ 8.01 (1H, d, J=8.4 Hz), 7.58-7.20 (19H, m), 6.87-6.79 (4H, m), 6.03 (1H, d, J=16.2 Hz), 5.29 (1H, d, J=8.4 Hz), 4.96 (1H, dd, J=13.1, 7.5 Hz), 4.80-4.54 (2H, m), 4.15 (1H, d, J=9.0 Hz), 3.78 (6H, s), 3.61-3.39 (3H, m), 3.37-3.25 (1H, m), 3.23-3.09 (1H, m), 1.91-1.56 (3H, m), 1.51-1.13 (3H, m), 0.66 (3H, s); ³¹P NMR (121.5 MHz, CDCl₃) δ 158.9 (1P, d, J=4.4 Hz).

### Example Z-29

### Oxazaphospholidine Monomer 21a.

[chemical structure]

[0935] Compound 21a was obtained by using “5′-O-(DMTr)-2′-O-methoxyethyl-5-methyluridine” instead of “5′-O-(DMTr)-2-N-(phenoxyacetyl)-6-O-(cyanoethyl)guanosine” in a similar manner to compound 12a. ¹H NMR (300 MHz, CDCl₃) δ 7.62-7.18 (21H, m), 6.84 (4H, d, J=8.7 Hz), 6.07 (1H, d, J=5.7 Hz), 4.86-4.76 (1H, m), 4.63-4.54 (1H, m), 4.20 (1H, t, J=5.4 Hz), 3.95-3.89 (1H, m), 3.78 (6H, s), 3.78-3.71 (2H, m), 3.60-3.48 (2H, m), 3.44-3.02 (5H, m), 3.31 (3H, s), 1.88-1.15 (6H, m), 1.35 (3H, s), 0.58 (3H, s); ³¹P NMR (121.5 MHz, CDCl₃) δ 156.3 (1P, s).

### Example Z-30

### Oxazaphospholidine Monomer 21b.

[chemical structure]

[0937] Compound 21b was obtained by using 3b instead of 3a in a similar manner to compound 21a. ¹H NMR (300 MHz, CDCl₃) δ 7.71 (1H, d, J=1.2 Hz), 7.55-7.22 (20H, m), 6.86-6.78 (4H, m), 5.99 (1H, d, J=3.9 Hz), 4.78-4.62 (2H, m), 4.13-4.08 (1H, m), 4.07-4.02 (1H, m), 3.77 (6H, s), 3.77-3.70 (1H, m), 3.65-3.56 (1H, m), 3.52-3.36 (4H, m), 3.33-3.14 (2H, m), 3.29 (3H, s), 3.08-2.94 (1H, m), 1.86-1.72 (1H, m), 1.71-1.55 (2H, m), 1.30 (3H, d, J=1.2 Hz), 1.47-1.16 (3H, m) 0.64 (3H, s); ³¹P NMR (121.5 MHz, CDCl₃) δ 155.6 (1P, s).

### Example Z-31

### Oxazaphospholidine Monomer 22a.

[chemical structure]

[0939] Compound 22a was obtained by using “5′-O-(DMTr)-2′-O-methyl-4-N-(isobutyryl)cytidine” instead of “5′-O-(DMTr)-2-N-(phenoxyacetyl)-6-O-(cyanoethyl)guanosine” in a similar manner to compound 12a. ¹H NMR (300 MHz, CDCl₃) δ 8.49 (1H, d, J=7.2 Hz), 7.58-7.20 (19H, m), 6.96 (1H, d, J=7.2 Hz), 6.90-6.82 (4H, m), 5.98 (1H, s), 4.84 (1H, dd, J=13.1, 7.5 Hz), 4.59 (1H, dt, J=8.3, 4.5 Hz), 4.19-4.13 (1H, m), 3.79 (6H, s), 3.78-3.72 (1H, m), 3.63-3.40 (3H, m), 3.55 (3H, s), 3.36-3.24 (1H, m), 3.09-2.95 (1H, m), 2.59 (1H, septet, J=6.9 Hz), 1.85-1.53 (5H, m), 1.48-1.37 (1H, m), 1.24-1.17 (6H, m), 0.59 (3H, s); ³¹P NMR (121.5 MHz, CDCl₃) δ 155.2 (1P, s).

### Example Z-32

### Oxazaphospholidine Monomer 22b.

[chemical structure]

[0941] Compound 22b was obtained by using 3b instead of 3a in a similar manner to compound 22a. ¹H NMR (300 MHz, CDCl₃) δ 8.62 (1H, d, J=7.5 Hz), 7.57-7.23 (19H, m), 7.02 (1H, d, J=7.5 Hz), 6.89-6.81 (4H, m), 5.92 (1H, s), 4.90 (1H, dt, J=9.0, 5.7 Hz), 4.61 (1H, dt, J=8.7, 4.8 Hz), 4.25-4.17 (1H, m), 3.81 (6H, s), 3.67 (1H, d, J=4.5 Hz), 3.62-3.25 (4H, m), 3.38 (3H, s), 3.16-3.02 (1H, m), 2.58 (1H, septet, J=6.9 Hz), 1.87-1.40 (6H, m), 1.26-1.14 (6H, m), 0.64 (3H, s); ³¹P NMR (121.5 MHz, CDCl₃) δ 158.2 (1P, s).

### Example Z-33

### Oxazaphospholidine Monomer 23a.

[chemical structure]

[0943] Compound 23a was obtained by using “5′-O-(DMTr)-2′-O-methyl-2-N-(phenoxyacetyl)-6-O-(cyanoethyl)guanosine” instead of “5′-O-(DMTr)-2-N-(phenoxyacetyl)-6-0-(cyanoethyl)guanosine” in a similar manner to compound 12a. ¹H NMR (300 MHz, CDCl₃) δ 8.67 (1H, brs), 8.01 (1H, s), 7.56-7.16 (24H, m), 6.83-6.74 (4H, m), 6.08 (1H, d, J=6.9 Hz), 4.85-4.76 (1H, m), 4.84 (2H, t, J=6.6 Hz), 4.65-4.56 (1H, m), 4.59 (2H, brs), 4.48 (1H, dd, J=6.6, 5.1 Hz), 4.09-4.05 (1H, m), 3.75 (6H, s), 3.60-3.42 (2H, m), 3.40-3.26 (2H, m), 3.35 (3H, s), 3.18-3.05 (1H, m), 3.08 (2H, t, J=6.6 Hz), 1.89-1.49 (3H, m), 1.48-1.16 (3H, m), 0.59 (3H, s); ³¹P NMR (121.5 MHz, CDCl₃) δ 156.9 (1P, s).

### Example Z-34

### Oxazaphospholidine Monomer 23b.

[chemical structure]

[0945] Compound 23b was obtained by using 3b instead of 3a in a similar manner to compound 23a. ¹H NMR (300 MHz, CDCl₃) δ 8.74 (1H, brs), 8.09 (1H, s), 7.56-6.94 (24H, m), 6.84-6.71 (4H, m), 6.09 (1H, d, J=4.8 Hz), 4.83-4.70 (2H, m), 4.83 (2H, t, J=6.6 Hz), 4.63 (2H, brs), 4.35 (1H, t, J=5.0 Hz), 4.23-4.16 (1H, m), 3.75 (6H, s), 3.58-3.19 (4H, m), 3.32 (3H, s), 3.16-3.04 (1H, m), 3.07 (2H, t, J=6.6 Hz), 1.90-1.55 (3H, m), 1.48-1.15 (3H, m), 0.64 (3H, s); ³¹P NMR (121.5 MHz, CDCl₃) δ 154.6 (1P, s).

### Example Z-35

### Oxazaphospholidine Monomer 24a.

[chemical structure]

[0947] Compound 24a was obtained by using “5′-O-(DMTr)-2′-deoxy-2′-fluoro-2-N-(phenoxyacetyl)-6-O-(cyanoethyl)guanosine” instead of “5′-O-(DMTr)-2-N-(phenoxyacetyl)-6-0-(cyanoethyl)guanosine” in a similar manner to compound 12a. ¹H NMR (300 MHz, CDCl₃) δ 8.74 (1H, brs), 8.03 (1H, s), 7.55-6.94 (24H, m), 6.80-6.69 (4H, m), 6.21 (1H, dd, J=14.9, 3.6 Hz), 5.34 (1H, dt, J=52.3, 3.6 Hz), 5.01-4.75 (2H, m), 4.84 (1H, t, J=6.6 Hz), 4.62 (2H, brs), 4.15-4.07 (1H, m), 3.73 (6H, s), 3.59-3.29 (4H, m), 3.15-3.00 (1H, m), 3.07 (2H, t, J=6.6 Hz), 1.90-1.49 (3H, m), 1.47-1.12 (3H, m), 0.58 (3H, s); ³¹P NMR (121.5 MHz, CDCl₃) δ 155.6 (1P, d, J=10.9 Hz).

### Example Z-36

### Oxazaphospholidine Monomer 24b.

[chemical structure]

[0949] Compound 24b was obtained by using 3b instead of 3a in a similar manner to compound 24a. ¹H NMR (300 MHz, CDCl₃) δ 8.81 (1H, brs), 8.06 (1H, s), 7.55-6.95 (24H, m), 6.77-6.69 (4H, m), 6.06 (1H, d, J=17.1 Hz), 5.24-5.08 (1H, m), 5.04-4.80 (2H, m), 4.87 (1H, t, J=6.6 Hz), 4.62 (2H, brs), 4.25-4.19 (1H, m), 3.73 (6H, s), 3.58-3.02 (5H, m), 3.10 (2H, t, J=6.6 Hz), 1.90-1.56 (3H, m), 1.50-1.15 (3H, m), 0.63 (3H, s); ³¹P NMR (121.5 MHz, CDCl₃) δ 158.0 (1P, d, J=4.4 Hz).

### Example Z-37

### Oxazaphospholidine Monomer 25a.

[chemical structure]

[0951] Compound 25a was obtained by using “5′-O-(DMTr)-2′-O-TOM-4-N-(acetyl)cytidine” instead of “5′-O-(DMTr)-2-N-(phenoxyacetyl)-6-O-(cyanoethyl)guanosine” in a similar manner to compound 12a. ¹H NMR (300 MHz, CDCl₃) δ 10.04 (1H, brs), 8.30 (1H, d, J=7.5 Hz), 7.51-7.21 (19H, m), 6.99 (1H, d, J=7.5 Hz), 6.89-6.81 (4H, m), 6.12 (1H, d, J=3.3 Hz), 5.07 (1H, d, J=4.8 Hz), 5.05 (1H, d, J=4.8 Hz), 4.84-4.75 (1H, m), 4.62-4.52 (1H, m), 4.31-4.25 (1H, m), 4.08-4.01 (1H, m), 3.78 (6H, d, J=3.0 Hz), 3.55-3.23 (4H, m), 3.10-2.96 (1H, m), 2.24 (3H, s), 1.84-1.49 (3H, m), 1.46-0.96 (24H, m), 0.58 (3H, s); ³¹P NMR (121.5 MHz, CDCl₃) δ 156.5 (1P, s).

### Example Z-38

### Oxazaphospholidine Monomer 25b.

[chemical structure]

[0953] Compound 25b was obtained by using 3b instead of 3a in a similar manner to compound 25a. ¹H NMR (300 MHz, CDCl₃) δ 10.19 (1H, brs), 8.46 (1H, d, J=7.5 Hz), 7.54-7.23 (19H, m), 7.01 (1H, d, J=7.5 Hz), 6.88-6.79 (4H, m), 6.19 (1H, d, J=1.8 Hz), 5.11 (1H, d, J=4.8 Hz), 5.07 (1H, d, J=4.8 Hz), 4.81-4.71 (1H, m), 4.60-4.51 (1H, m), 4.26-4.18 (2H, m), 3.79 (6H, s), 3.63-3.55 (1H, m), 3.48-3.28 (2H, m), 3.21-2.94 (2H, m), 2.26 (3H, s), 1.81-1.49 (3H, m), 1.43-0.96 (24H, m), 0.62 (3H, s); ³¹P NMR (121.5 MHz, CDCl₃) δ 156.4 (1P, s).

### Example Z-39

### Oxazaphospholidine Monomer 26a.

[chemical structure]

[0955] Compound 26a was obtained by using “5′-O-(DMTr)-2′-deoxy-2′-fluoro-4-N-(isobutyryl)cytidine” instead of “5′-O-(DMTr)-2-N-(phenoxyacetyl)-6-O-(cyanoethyl)guanosine” in a similar manner to compound 12a. ¹H NMR (300 MHz, CDCl₃) δ 8.66 (1H, brs), 8.41 (1H, d, J=7.5 Hz), 7.55-7.20 (19H, m), 7.01 (1H, d, J=7.5 Hz), 6.89-6.81 (4H, m), 6.06 (1H, d, J=15.9 Hz), 4.85 (1H, dd, J=51.4, 3.9 Hz), 4.84 (1H, dd, J=12.9, 7.5 Hz), 4.77-4.59 (1H, m), 4.15-4.08 (1H, m), 3.79 (6H, s), 3.63-3.29 (4H, m), 3.10-2.96 (1H, m), 2.65 (1H, septet, J=6.9 Hz), 1.85-1.53 (3H, m), 1.48-1.17 (3H, m), 1.21 (3H, d, J=4.8 Hz), 1.19 (3H, d, J=4.8 Hz), 0.59 (3H, s); ³¹P NMR (121.5 MHz, CDCl₃) δ 155.5 (1P, d, J=6.6 Hz).

### Example Z-40

### Oxazaphospholidine Monomer 26b.

[chemical structure]

[0957] Compound 26b was obtained by using 3b instead of 3a in a similar manner to compound 26a. ¹H NMR (300 MHz, CDCl₃) δ 8.53 (1H, d, J=7.5 Hz), 7.57-7.23 (20H, m), 7.10 (1H, d, J=7.5 Hz), 6.89-6.81 (4H, m), 6.10 (1H, d, J=15.9 Hz), 5.00-4.92 (1H, m), 4.84 (1H, dd, J=51.5, 3.3 Hz), 4.75-4.58 (1H, m), 4.24 (1H, d, J=9.3 Hz), 3.81 (6H, s), 3.65-3.39 (3H, m), 3.32-3.06 (2H, m), 2.59 (1H, septet, J=6.9 Hz), 1.88-1.53 (4H, m), 1.49-1.34 (2H, m), 1.27-1.18 (6H, m), 0.65 (3H, s); ³¹P NMR (121.5 MHz, CDCl₃) δ 159.0 (1P, d, J=4.4).

### Oxazaphospholidine Monomer 27a

[chemical structure]

[0959] Compound 27a was obtained by using “5′-O-(DMTr)-2′-O-methyl-6-N-(benzoyl)adenosine” instead of” 5′-O-(DMTr)-2-N-(phenoxyacetyl)-6-O-(cyanoethyl)guanosine” in a similar manner to compound 12a.

[0960] ¹H NMR (300 MHz, CDCl₃) δ 8.66 (1H, s), 8.13 (1H, s), 8.03 (2H, d, J=7.2 Hz), 7.64-7.16 (23H, m), 6.79 (4H, d, J=8.7 Hz), 6.08 (1H, d, J=6.3 Hz), 4.91-4.81 (1H, m), 4.77-4.69 (1H, m), 4.64-4.57 (1H, m), 4.15-4.10 (1H, m), 3.76 (6H, s), 3.60-3.23 (4H, m), 3.35 (3H, s), 3.14-3.00 (1H, m), 1.90-1.19 (6H, m), 0.62 (3H, s); ³¹P NMR (121.5 MHz, CDCl₃) δ 155.8 (1P, s).

### Oxazaphospholidine Monomer 27b.

[chemical structure]

[0962] Compound 27b was obtained by using 3b instead of 3a in a similar manner to compound 27a.

[0963] ¹H NMR (300 MHz, CDCl₃) δ 9.12 (1H, brs), 8.73 (1H, s), 8.24 (1H, s), 8.07-8.01 (2H, m), 7.62-7.17 (22H, m), 6.83-6.77 (4H, m), 6.12 (1H, d, J=4.8 Hz), 4.84-4.73 (2H, m), 4.43 (1H, t, J=4.8 Hz), 4.25-4.19 (1H, m), 3.77 (6H, s), 3.55-3.20 (4H, m), 3.28 (3H, s), 3.16-3.03 (1H, m), 1.90-1.17 (6H, m), 0.65 (3H, s); ³¹P NMR (121.5 MHz, CDCl₃) δ 155.0 (1P, s).

### Oxazaphospholidine Monomer 28a.

[chemical structure]

[0965] Compound 28a was obtained by using “5′-O-(DMTr)-2′-deoxy-2′-fluoro-6-N-(benzoyl)adenosine” instead of “5′-O-(DMTr)-2-N-(phenoxyacetyl)-6-O-(cyanoethyl)guanosine” in a similar manner to compound 12a.

[0966] ¹H NMR (300 MHz, CDCl₃) δ 8.64 (1H, s), 8.14 (1H, s), 8.06-8.01 (2H, m), 7.63-7.07 (23H, m), 6.78-6.70 (4H, m), 6.12 (1H, dd, J=18.0, 2.4 Hz), 5.24-5.01 (2H, m), 4.94-4.84 (1H, m), 4.17-4.06 (1H, m), 3.73 (6H, s), 3.55-3.40 (3H, m), 3.30-3.22 (1H, m), 3.03-2.88 (1H, m), 1.92-1.19 (6H, m), 0.62 (3H, s); ³¹P NMR (121.5 MHz, CDCl₃) δ 150.5 (1P, d, J=7.7 Hz).

### Oxazaphospholidine Monomer 28b.

[chemical structure]

[0968] Compound 28b was obtained by using 3b instead of 3a in a similar manner to compound 28a.

[0969] ¹H NMR (300 MHz, CDCl₃) δ 9.07 (1H, brs), 8.80 (1H, s), 8.24 (1H, s), 8.08-8.01 (2H, m), 7.66-7.15 (22H, m), 6.81-6.75 (4H, m), 6.14 (1H, dd, J=18.0, 1.8 Hz), 5.16-4.91 (3H, m), 4.28-4.21 (1H, m), 3.76 (6H, s), 3.57-3.11 (5H, m), 1.82-1.16 (6H, m), 0.65 (3H, s); ³¹P NMR (121.5 MHz, CDCl₃) δ 157.8 (1P, d, J=5.6 Hz).

### Oxazaphospholidine Monomer 29a.

[chemical structure]

[0971] Compound 29a was obtained by using “5′-O-(DMTr)-2′-O-TOM-2-N-(acetyl)guanosine” instead of “5′-O-(DMTr)-2-N-(phenoxyacetyl)-6-O-(cyanoethyl)guanosine” in a similar manner to compound 12a.

[0972] ¹H NMR (300 MHz, CDCl₃) δ 7.70 (1H, s), 7.63-7.13 (21H, m), 6.84-6.76 (4H, m), 5.77 (1H, d, J=8.4 Hz), 5.41-5.33 (1H, m), 4.90 (2H, s), 4.78-4.68 (2H, m), 3.86 (1H, brs), 3.75 (3H, s), 3.74 (3H, s), 3.56-3.41 (2H, m), 3.32-2.90 (3H, m), 1.92-1.10 (9H, m), 0.97-0.87 (21H, m), 0.52 (3H, s); ³¹P NMR (121.5 MHz, CDCl₃) δ 158.1 (1P, s).

### Oxazaphospholidine Monomer 29b.

[chemical structure]

[0974] Compound 29b was obtained by using 3b instead of 3a in a similar manner to compound 29a.

[0975] ¹H NMR (300 MHz, CDCl₃) δ 7.77 (1H, s), 7.56-7.15 (21H, m), 6.82-6.75 (4H, m), 5.86 (1H, d, J=7.5 Hz), 5.26-5.17 (1H, m), 4.95 (1H, d, J=5.4 Hz), 4.85 (1H, d, J=5.4 Hz), 4.78-4.71 (1H, m), 4.59-4.49 (1H, m), 4.10-4.05 (1H, m), 3.74 (6H, s), 3.52-3.37 (2H, m), 3.30-3.18 (1H, m), 3.11-2.85 (2H, m), 1.85-1.15 (9H, m), 0.93-0.84 (21H, m), 0.62 (3H, s); ³¹P NMR (121.5 MHz, CDCl₃) δ 152.3 (1P, s).

### Oxazaphospholidine Monomer 30a.

[chemical structure]

[0977] Compound 30a was obtained by using “5′-O-(DMTr)-2′-O-TOM-uridine” instead of “5′-O-(DMTr)-2-N-(phenoxyacetyl)-6-O-(cyanoethyl)guanosine” in a similar manner to compound 12a.

[0978] ¹H NMR (300 MHz, CDCl₃) δ 7.76 (1H, d, J=8.1 Hz), 7.55-7.18 (20H, m), 6.88-6.80 (4H, m), 6.11 (1H, d, J=6.0 Hz), 5.32 (1H, d, J=8.1 Hz), 4.99 (1H, d, J=5.1 Hz), 4.93 (1H, d, J=5.1 Hz), 4.84-4.75 (1H, m), 4.54-4.46 (1H, m), 4.38 (1H, t, J=5.7 Hz), 3.87-3.83 (1H, m), 3.78 (3H, s), 3.77 (3H, s), 3.56-3.42 (1H, m), 3.39-3.28 (1H, m), 3.36 (1H, dd, J=11.0, 2.7 Hz), 3.25 (1H, dd, J=11.0, 2.7 Hz), 3.16-3.03 (1H, m), 1.88-1.12 (6H, m), 1.08-0.97 (21H, m), 0.59 (3H, s); ³¹P NMR (121.5 MHz, CDCl₃) δ 156.6 (1P, s).

### Oxazaphospholidine Monomer 30b.

[chemical structure]

[0980] Compound 30b was obtained by using 3b instead of 3a in a similar manner to compound 30a.

[0981] ¹H NMR (600 MHz, CDCl₃) δ 7.87 (1H, d, J=7.8 Hz), 7.52-7.48 (4H, m), 7.38-7.21 (16H, m), 6.83-6.79 (4H, m), 6.14 (1H, d, J=4.8 Hz), 5.33 (1H, d, J=7.8 Hz), 4.99 (1H, d, J=5.4 Hz), 4.89 (1H, d, J=5.4 Hz), 4.67 (1H, dd, J=13.8, 7.2 Hz), 4.52 (1H, dt, J=10.4, 4.8 Hz), 4.31 (1H, t, J=4.8 Hz), 4.06-4.03 (1H, m), 3.78 (3H, s), 3.77 (3H, s), 3.47 (1H, dd, J=10.4, 2.4 Hz), 3.47-3.39 (1H, m), 3.22-3.17 (2H, m), 3.00 (1H, ddd, J=19.5, 10.4, 4.8 Hz), 1.82-1.74 (1H, m), 1.68-1.58 (1H, m), 1.56 (1H, dd, J=14.4, 8.4 Hz), 1.38 (1H, dd, J=14.4, 7.2 Hz), 1.31-1.25 (1H, m), 1.26-1.17 (1H, m), 1.08-0.98 (21H, m), 0.63 (3H, s); ³¹P NMR (243.0 MHz, CDCl₃) δ 154.3 (1P, s).

### Oxazaphospholidine Monomer 31a.

[chemical structure]

[0983] Compound 31a was obtained by using “5′-O-(DMTr)-2′-0,4′-C-methylene-6-N-(benzoyl)adenosine” instead of “5′-O-(DMTr)-2-N-(phenoxyacetyl)-6-O-(cyanoethyl)guanosine” in a similar manner to compound 12a.

[0984] ¹H NMR (300 MHz, CDCl₃) δ 9.10 (1H, brs), 8.76 (1H, s), 8.32 (1H, s), 8.04 (2H, d, J=7.2 Hz), 7.64-7.18 (22H, m), 6.84 (4H, d, J=8.7 Hz), 6.10 (1H, s), 4.76 (1H, d J=6.9 Hz), 4.58 (1H, s), 4.61-4.51 (1H, m), 3.91 (1H, d, J=7.8 Hz), 3.77 (1H, d, J=7.8 Hz), 3.75 (6H, s), 3.50 (1H, s), 3.47-3.33 (1H, m), 3.31-3.19 (1H, m), 3.03-2.88 (1H, m), 1.84-1.09 (6H, m), 0.51 (3H, s); ³¹P NMR (121.5 MHz, CDCl₃) δ 152.9 (1P, s).

### Oxazaphospholidine Monomer 31b.

[chemical structure]

[0986] Compound 31b was obtained by using 3b instead of 3a in a similar manner to compound 31a.

[0987] ¹H NMR (300 MHz, CDCl₃) δ 8.81 (1H, s), 8.30 (1H, s), 8.07-8.00 (2H, m), 7.64-7.17 (22H, m), 6.86-6.79 (4H, m), 6.12 (1H, s), 4.81-4.72 (1H, m), 4.62 (1H, d J=7.2 Hz), 4.57 (1H, s), 3.94 (1H, d, J=7.8 Hz), 3.89 (1H, d, J=7.8 Hz), 3.77 (6H, s), 3.48 (2H, s), 3.46-3.32 (1H, m), 3.24-3.13 (1H, m), 3.10-2.97 (1H, m), 1.84-1.49 (3H, m), 1.42-1.09 (3H, m), 0.58 (3H, s); ³¹P NMR (121.5 MHz, CDCl₃) δ 157.3 (1P, s).

### Oxazaphospholidine Monomer 32a.

[chemical structure]

[0989] Compound 32a was obtained by using “5′-O-(DMTr)-2′-O, 4′-C-methylene-4-N-(isobutyryl)-5-methylcytidine” instead of “5′-O-(DMTr)-2-N-(phenoxyacetyl)-6-O-(cyanoethyl)guanosine” in a similar manner to compound 12a.

[0990] ¹H NMR (300 MHz, CDCl₃) δ 7.88 (1H, brs), 7.58-7.18 (20H, m), 6.88-6.80 (4H, m), 5.65 (1H, s), 4.69-4.60 (1H, m), 4.52 (1H, d, J=6.6 Hz), 4.49 (1H, s), 3.81-3.74 (1H, m), 3.75 (3H, s), 3.73 (3H, s), 3.64 (1H, d, J=8.1 Hz), 3.56 (1H, d, J=11.1 Hz), 3.53 (1H, d, J=8.1 Hz), 3.46 (1H, d, J=11.1 Hz), 3.56-3.40 (1H, m), 3.32-3.20 (1H, m), 3.14-3.00 (1H, m), 1.85-1.12 (6H, m), 1.60 (3H, s), 1.19 (6H, d, J=6.9 Hz), 0.55 (3H, s); ³¹P NMR (121.5 MHz, CDCl₃) δ 155.9 (1P, s).

### Oxazaphospholidine Monomer 32b.

[chemical structure]

[0992] Compound 32b was obtained by using 3b instead of 3a in a similar manner to compound 32a.

[0993] ¹H NMR (300 MHz, CDCl₃) δ 7.86 (1H, brs), 7.56-7.19 (20H, m), 6.88-6.79 (4H, m), 5.69 (1H, s), 4.86-4.76 (1H, m), 4.46 (1H, s), 4.45 (1H, d, J=7.5 Hz), 3.80-3.75 (1H, m), 3.79 (6H, s), 3.74 (1H, d, J=8.1 Hz), 3.69 (1H, d, J=8.1 Hz), 3.51 (1H, d, J=11.1 Hz), 3.44-3.30 (1H, m), 3.39 (1H, d, J=11.1 Hz), 3.29-3.17 (1H, m), 3.11-2.97 (1H, m), 1.86-1.52 (3H, m), 1.64 (3H, s), 1.45-1.10 (3H, m), 1.21 (6H, d, J=6.6 Hz), 0.62 (3H, s); ³¹P NMR (121.5 MHz, CDCl₃) δ 158.2 (1P, s).

### Oxazaphospholidine Monomer 33a.

[chemical structure]

[0995] Compound 33a was obtained by using “5′-O-(DMTr)-2′-O, 4′-C-methylene-2-N-(phenoxyacetyl)-6-O-(cyanoethyl)guanosine” instead of “5′-O-(DMTr)-2-N-(phenoxyacetyl)-6-0-(cyanoethyl)guanosine” in a similar manner to compound 12a.

[0996] ¹H NMR (300 MHz, CDCl₃) δ 8.71 (1H, brs), 8.16 (1H, s), 7.50-7.17 (21H, m), 7.09-7.01 (3H, m), 6.86-6.79 (4H, m), 6.03 (1H, s), 4.84 (2H, t, J=6.6 Hz), 4.72 (2H, s), 4.68 (1H, d, J=7.2 Hz), 4.55-4.46 (1H, m), 4.50 (1H, s), 3.90 (1H, d, J=7.8 Hz), 3.77 (1H, d, J=7.8 Hz), 3.75 (6H, s), 3.51 (1H, d, J=10.8 Hz), 3.47 (1H, d, J=10.8 Hz), 3.45-3.21 (2H, m), 3.08 (2H, t, J=6.6 Hz), 3.03-2.89 (1H, m), 1.80-1.08 (6H, m), 0.47 (3H, s); ³¹P NMR (121.5 MHz, CDCl₃) δ 153.2 (1P, s).

### Oxazaphospholidine Monomer 33b.

[chemical structure]

[0998] Compound 33b was obtained by using 3b instead of 3a in a similar manner to compound 33a.

[0999] ¹H NMR (300 MHz, CDCl₃) δ 8.86 (1H, brs), 8.13 (1H, s), 7.55-7.17 (21H, m), 7.08-6.98 (3H, m), 6.95-6.78 (4H, m), 6.01 (1H, s), 4.86 (2H, t, J=6.6 Hz), 4.82-4.73 (1H, m), 4.70 (2H, s), 4.64 (1H, d, J=7.5 Hz), 4.49 (1H, s), 3.94 (1H, d, J=7.8 Hz), 3.89 (1H, d, J=7.8 Hz), 3.77 (6H, s), 3.46 (2H, s), 3.45-3.30 (1H, m), 3.24-3.12 (1H, m), 3.09 (2H, t, J=6.6 Hz), 3.09-2.96 (1H, m), 1.81-1.50 (3H, m), 1.41-1.06 (3H, m), 0.58 (3H, s); ³¹P NMR (121.5 MHz, CDCl₃) δ 157.4 (1P, s).

### Oxazaphospholidine Monomer 34a.

[chemical structure]

[1001] Compound 34a was obtained by using “5′-O-(DMTr)-2′-0,4′-C-methylene-5-methyluridine” instead of “5′-O-(DMTr)-2-N-(phenoxyacetyl)-6-O-(cyanoethyl)guanosine” in a similar manner to compound 12a.

[1002] ¹H NMR (300 MHz, CDCl₃) δ 7.71 (1H, d, J=0.9 Hz), 7.50-7.17 (20H, m), 6.87-6.80 (4H, m), 5.61 (1H, s), 4.69-4.60 (1H, m), 4.55 (1H, d, J=6.9 Hz), 4.41 (1H, s), 3.74 (3H, s), 3.73 (3H, s), 3.64 (1H, d, J=7.8 Hz), 3.55 (1H, d, J=7.8 Hz), 3.53 (1H, d, J=10.8 Hz), 3.46 (1H, d, J=10.8 Hz), 3.56-3.42 (1H, m), 3.35-3.24 (1H, m), 3.13-3.00 (1H, m), 1.85-1.45 (3H, m), 1.55 (3H, d, J=0.9 Hz), 1.41-1.12 (3H, m), 0.56 (3H, s); ³¹P NMR (121.5 MHz, CDCl₃) δ 155.1 (1P, s).

### Oxazaphospholidine Monomer 34b.

[chemical structure]

[1004] Compound 34b was obtained by using 3b instead of 3a in a similar manner to compound 34a.

[1005] ¹H NMR (300 MHz, CDCl₃) δ 7.69 (1H, s), 7.56-7.19 (20H, m), 6.88-6.79 (4H, m), 5.66 (1H, s), 4.87-4.77 (1H, m), 4.47 (1H, d, J=7.8 Hz), 4.40 (1H, s), 3.78 (6H, s), 3.74 (1H, d, J=7.8 Hz), 3.68 (1H, d, J=7.8 Hz), 3.50 (1H, d, J=10.8 Hz), 3.46-3.32 (1H, m), 3.39 (1H, d, J=10.8 Hz), 3.30-3.19 (1H, m), 3.12-2.98 (1H, m), 1.85-1.56 (3H, m), 1.59 (3H, s), 1.46-1.12 (3H, m), 0.63 (3H, s); ³¹P NMR (121.5 MHz, CDCl₃) δ 158.1 (1P, s).

### Oxazaphospholidine Monomer 35a.

[chemical structure]

[1007] Compound 35a was obtained by using 13a′ instead of 3a in a similar manner to compound 13a. ¹H NMR (600 MHz, CDCl₃) δ 7.76 (2H, d, J=9.0 Hz), 7.62 (1H, d, J=1.2 Hz), 7.40 (2H, d, J=7.2 Hz), 7.32-7.23 (10H, m), 6.85 (4H, d, J=8.4 Hz), 6.41 (1H, dd, J=8.4, 5.4 Hz), 4.94 (1H, dd, J=12.3, 5.4 Hz), 4.84-4.79 (1H, m), 4.03-4.01 (1H, m), 3.79 (6H, s), 3.59-3.53 (1H, m), 3.52-3.44 (2H, m), 3.41 (1H, dd, J=14.7, 7.2 Hz), 3.37-3.30 (2H, m), 3.13 (1H, ddd, J=19.3, 10.3, 4.1 Hz), 2.50-2.44 (1H, m), 2.39 (3H, s), 2.35-2.29 (1H, m), 1.91-1.72 (2H, m), 1.64-1.59 (1H, m), 1.40 (3H, s), 1.12-1.05 (1H, m); ³¹P NMR (243.0 MHz, CDCl₃) δ 154.2 (1P, s).

### Example Z-41

[chemical structure]

[1009] The above Compound Z-27, which represents a conventional monomer, was used to produce oligos. FIG. 70 shows a chart of products obtained through Comparison Example Z-1. As shown in FIGS. 69 and 70, the present monomers provided more complete deprotection and less side product, which makes product isolation and/or purification easier.

[1010] In some embodiments, the present invention provides chemically stable monomers. Exemplary such monomers are depicted in the Examples above. In some embodiments, the present invention provides monomers with high isolated yield. In some embodiments, the present invention provides monomers with isolated yield higher than conventional method. In some embodiments, the isolated yield is more than 80%. Exemplary such monomers are depicted in the Examples above.

### Condensing Reagent

[1011] Condensing reagents (C_{R}) useful in accordance with methods of the present invention are of any one of the following general formulae:

[chemical structure]

wherein Z¹, Z², Z³, Z⁴, Z⁵, Z⁶, Z⁷, Z⁸, and Z⁹ are independently optionally substituted group selected from alkyl, aminoalkyl, cycloalkyl, heterocyclic, cycloalkylalkyl, heterocycloalkyl, aryl, heteroaryl, alkyloxy, aryloxy, or heteroaryloxy, or wherein any of Z² and Z³, Z⁵ and Z⁶, Z⁷ and Z⁸, Z⁸ and Z⁹, Z⁹ and Z⁷, or Z⁷ and Z⁸ and Z⁹ are taken together to form a 3 to 20 membered alicyclic or heterocyclic ring; Q- is a counter anion; and LG is a leaving group.

[1012] In some embodiments, a counter ion of a condensing reagent C_{R} is Cl⁻, Br⁻, BF₄⁻, PF₆⁻, TfO⁻, Tf₂N⁻, AsF₆⁻, ClO₄⁻, or SbF₆⁻, wherein Tf is CF₃SO₂. In some embodiments, a leaving group of a condensing reagent C_{R} is F, Cl, Br, I, 3-nitro-1,2,4-triazole, imidazole, alkyltriazole, tetrazole, pentafluorobenzene, or 1-hydroxybenzotriazole.

[1013] Examples of condensing reagents used in accordance with methods of the present invention include, but are not limited to, pentafluorobenzoyl chloride, carbonyldiimidazole (CDI), 1-mesitylenesulfonyl-3-nitrotriazole (MSNT), 1-ethyl-3-(3′-dimethylaminopropyl)carbodiimide hydrochloride (EDCI-HCl), benzotriazole-1-yloxytris(dimethylamino)phosphonium hexafluorophosphate (PyBOP), N,N′-bis(2-oxo-3-oxazolidinyl)phosphinic chloride (BopCl), 2-(1H-7-azabenzotriazol-1-yl)-1,1,3,3-tetramethyluronium hexafluorophosphate (HATU), and 0-benzotriazole-N,N,N′,N′-tetramethyluronium hexafluorophosphate (HBTU), DIPCDI; N,N′-bis(2-oxo-3-oxazolidinyl)phosphinic bromide (BopBr), 1,3-dimethyl-2-(3-nitro-1,2,4-triazol-1-yl)-2-pyrrolidin-1-yl-1,3,2-diazaphospholidinium hexafluorophosphate (MNTP), 3-nitro-1,2,4-triazol-1-yl-tris(pyrrolidin-1-yl)phosphonium hexafluorophosphate (PyNTP), bromotripyrrolidinophosphonium hexafluorophosphate (PyBrOP); O-(benzotriazol-1-yl)-N,N,N′,N′-tetramethyluronium tetrafluoroborate (TBTU); and tetramethylfluoroformamidinium hexafluorophosphate (TFFH). In certain embodiments, a counter ion of the condensing reagent C_{R} is Cl⁻, Br⁻, BF₄⁻, PF₆⁻, TfO⁻, Tf₂N⁻, AsF₆⁻, ClO₄⁻, or SbF₆⁻, wherein Tf is CF₃SO₂.

[1014] In some embodiments, a condensing reagent is 1-(2,4,6-triisopropylbenzenesulfonyl)-5-(pyridin-2-yl) tetrazolide, pivaloyl chloride, bromotrispyrrolidinophosphonium hexafluorophosphate, N,N′-bis(2-oxo-3-oxazolidinyl) phosphinic chloride (BopCl), or 2-chloro-5,5-dimethyl-2-oxo-1,3,2-dioxaphosphinane. In some embodiment, a condensing reagent is N,N′-bis(2-oxo-3-oxazolidinyl)phosphinic chloride (BopCl). In some embodiments, a condensing reagent is selected from those described in WO/2006/066260).

[1015] In some embodiments, a condensing reagent is 1,3-dimethyl-2-(3-nitro-1,2,4-triazol-1-yl)-2-pyrrolidin-1-yl-1,3,2-diazaphospholidinium hexafluorophosphate (MNTP), or 3-nitro-1,2,4-triazol-1-yl-tris(pyrrolidin-1-yl)phosphonium hexafluorophosphate (PyNTP):

[chemical structure]

### Selection of Base and Sugar of Nucleoside Coupling Partner

[1016] As described herein, nucleoside coupling partners for use in accordance with methods of the present invention can be the same as one another or can be different from one another. In some embodiments, nucleoside coupling partners for use in the synthesis of a provided oligonucleotide are of the same structure and/or stereochemical configuration as one another. In some embodiments, each nucleoside coupling partner for use in the synthesis of a provided oligonucleotide is not of the same structure and/or stereochemical configuration as certain other nucleoside coupling partners of the oligonucleotide. Exemplary nucleobases and sugars for use in accordance with methods of the present invention are described herein. One of skill in the relevant chemical and synthetic arts will recognize that any combination of nucleobases and sugars described herein are contemplated for use in accordance with methods of the present invention.

### Coupling Step:

[1017] Exemplary coupling procedures and chiral reagents and condensing reagents for use in accordance with the present invention are outlined in, inter alia, Wada I (JP4348077; WO2005/014609; WO2005/092909), Wada II (WO2010/064146), and Wada III (WO2012/039448). Chiral nucleoside coupling partners for use in accordance with the present invention are also referred to herein as “Wada amidites.” In some embodiments, a coupling partner has the structure of

[chemical structure]

wherein B^{PRO} is a protected nucleobase. In some embodiments, a coupling partner has the structure of

[chemical structure]

wherein B^{PRO} is a protected nucleobase. Exemplary chiral phosphoramidites as coupling partner are depicted below:

[chemical structure]

[1018] One of the methods used for synthesizing the coupling partner is depicted in Scheme II, below.

[chemical structure]

[1019] In some embodiments, the step of coupling comprises reacting a free hydroxyl group of a nucleotide unit of an oligonucleotide with a nucleoside coupling partner under suitable conditions to effect the coupling. In some embodiments, the step of coupling is preceded by a step of deblocking. For instance, in some embodiments, the 5′ hydroxyl group of the growing oligonucleotide is blocked (i.e., protected) and must be deblocked in order to subsequently react with a nucleoside coupling partner.

[1020] Once the appropriate hydroxyl group of the growing oligonucleotide has been deblocked, the support is washed and dried in preparation for delivery of a solution comprising a chiral reagent and a solution comprising an activator. In some embodiments, a chiral reagent and an activator are delivered simultaneously. In some embodiments, co-delivery comprises delivering an amount of a chiral reagent in solution (e.g., a phosphoramidite solution) and an amount of activator in a solution (e.g., a CMPT solution) in a polar aprotic solvent such as a nitrile solvent (e.g., acetonitrile).

[1021] In some embodiments, the step of coupling provides a crude product composition in which the chiral phosphite product is present in a diastereomeric excess of >95%. In some embodiments, the chiral phosphite product is present in a diastereomeric excess of >96%. In some embodiments, the chiral phosphite product is present in a diastereomeric excess of >97%. In some embodiments, the chiral phosphite product is present in a diastereomeric excess of >98%. In some embodiments, the chiral phosphite product is present in a diastereomeric excess of >99%.

### Capping Step:

[1022] Provided methods for making chirally controlled oligonucleotides comprise a step of capping. In some embodiments, a step of capping is a single step. In some embodiments, a step of capping is two steps. In some embodiments, a step of capping is more than two steps.

[1023] In some embodiments, a step of capping comprises steps of capping the free amine of the chiral auxiliary and capping any residual unreacted 5′ hydroxyl groups. In some embodiments, the free amine of the chiral auxiliary and the unreacted 5′ hydroxyl groups are capped with the same capping group. In some embodiments, the free amine of the chiral auxiliary and the unreacted 5′ hydroxyl groups are capped with different capping groups. In certain embodiments, capping with different capping groups allows for selective removal of one capping group over the other during synthesis of the oligonucleotide. In some embodiments, the capping of both groups occurs simultaneously. In some embodiments, the capping of both groups occurs iteratively.

[1024] In certain embodiments, capping occurs iteratively and comprises a first step of capping the free amine followed by a second step of capping the free 5′ hydroxyl group, wherein both the free amine and the 5′ hydroxyl group are capped with the same capping group. For instance, in some embodiments, the free amine of the chiral auxiliary is capped using an anhydride (e.g., phenoxyacetic anhydride, i.e., Pac₂O) prior to capping of the 5′ hydroxyl group with the same anhydride. In certain embodiments, the capping of the 5′ hydroxyl group with the same anhydride occurs under different conditions (e.g., in the presence of one or more additional reagents). In some embodiments, capping of the 5′ hydroxyl group occurs in the presence of an amine base in an etherial solvent (e.g., NMI (N-methylimidazole) in THF). The phrase “capping group” is used interchangeably herein with the phrases “protecting group” and “blocking group”.

[1025] In some embodiments, an amine capping group is characterized in that it effectively caps the amine such that it prevents rearrangement and/or decomposition of the intermediate phosphite species. In some embodiments, a capping group is selected for its ability to protect the amine of the chiral auxiliary in order to prevent intramolecular cleavage of the internucleotide linkage phosphorus.

[1026] In some embodiments, a 5′ hydroxyl group capping group is characterized in that it effectively caps the hydroxyl group such that it prevents the occurrence of “shortmers,” e.g., “n-m”(m and n are integers and m<n; n is the number of bases in the targeted oligonucleotide) impurities that occur from the reaction of an oligonucleotide chain that fails to react in a first cycle but then reacts in one or more subsequent cycles. The presence of such shortmers, especially “n-1”, has a deleterious effect upon the purity of the crude oligonucleotide and makes final purification of the oligonucleotide tedious and generally low-yielding.

[1027] In some embodiments, a particular cap is selected based on its tendency to facilitate a particular type of reaction under particular conditions. For instance, in some embodiments, a capping group is selected for its ability to facilitate an E1 elimination reaction, which reaction cleaves the cap and/or auxiliary from the growing oligonucleotide. In some embodiments, a capping group is selected for its ability to facilitate an E2 elimination reaction, which reaction cleaves the cap and/or auxiliary from the growing oligonucleotide. In some embodiments, a capping group is selected for its ability to facilitate a P-elimination reaction, which reaction cleaves the cap and/or auxiliary from the growing oligonucleotide.

### Modifying Step:

[1028] As used herein, the phrase “modifying step”, “modification step” and “P-modification step” are used interchangeably and refer generally to any one or more steps used to install a modified internucleotidic linkage. In some embodiments, the modified internucleotidic linkage having the structure of formula I. A P-modification step of the present invention occurs during assembly of a provided oligonucleotide rather than after assembly of a provided oligonucleotide is complete. Thus, each nucleotide unit of a provided oligonucleotide can be individually modified at the linkage phosphorus during the cycle within which the nucleotide unit is installed.

[1029] In some embodiments, a suitable P-modification reagent is a sulfur electrophile, selenium electrophile, oxygen electrophile, boronating reagent, or an azide reagent.

[1030] For instance, in some embodiments, a selemium reagent is elemental selenium, a selenium salt, or a substituted diselenide. In some embodiments, an oxygen electrophile is elemental oxygen, peroxide, or a substituted peroxide. In some embodiments, a boronating reagent is a borane-amine (e.g., N,N-diisopropylethylamine (BH₃·DIPEA), borane-pyridine (BH₃·Py), borane-2-chloropyridine (BH₃·CPy), borane-aniline (BH₃·An)), a borane-ether reagent (e.g., borane-tetrahydrofuran (BH₃·THF)), a borane-dialkylsulfide reagent (e.g., BH₃·Me₂S), aniline-cyanoborane, or a triphenylphosphine-carboalkoxyborane. In some embodiments, an azide reagent is comprises an azide group capable of undergoing subsequent reduction to provide an amine group.

[1031] In some embodiments, a P-modification reagent is a sulfurization reagent as described herein. In some embodiments, a step of modifying comprises sulfurization of phosphorus to provide a phosphorothioate linkage or phosphorothioate triester linkage. In some embodiments, a step of modifying provides an oligonucleotide having an internucleotidic linkage of formula I.

[1032] In some embodiments, the present invention provides sulfurizing reagents, and methods of making, and use of the same.

[1033] In some embodiments, such sulfurizing reagents are thiosulfonate reagents. In some embodiments, a thiosulfonate reagent has a structure of formula S-I:

[chemical structure]

wherein:
[1034] R^{s1} is R; and
[1035] each of R, L and R¹ is independently as defined and described above and herein.

[1036] In some embodiments, the sulfurizing reagent is a bis(thiosulfonate) reagent. In some embodiments, the bis(thiosulfonate) reagent has the structure of formula S-II:

[chemical structure]

wherein each of R^{s1} and L is independently as defined and described above and herein.

[1037] As defined generally above, R^{s1} is R, wherein R is as defined and described above and herein. In some embodiments, R^{s1} is optionally substituted aliphatic, aryl, heterocyclyl or heteroaryl. In some embodiments, R^{s1} is optionally substituted alkyl. In some embodiments, R^{s1} is optionally substituted alkyl. In some embodiments, R^{s1} is methyl. In some embodiments, R^{s1} is cyanomethyl. In some embodiments, R^{s1} is nitromethyl. In some embodiments, R^{s1} is optionally substituted aryl. In some embodiments, R^{s1} is optionally substituted phenyl. In some embodiments, R^{s1} is phenyl. In some embodiments, R^{s1} is p-nitrophenyl. In some embodiments, R^{s1} is p-methylphenyl. In some embodiments, R^{s1} is p-chlorophenyl. In some embodiments, R^{s1} is o-chlorophenyl. In some embodiments, R^{s1} is 2,4,6-trichlorophenyl. In some embodiments, R^{s1} is pentafluorophenyl. In some embodiments, R^{s1} is optionally substituted heterocyclyl. In some embodiments, R^{s1} is optionally substituted heteroaryl.

[1038] In some embodiments, R^{s1}—S(O)₂S— is

[chemical structure]

(MTS). In some
embodiments, R^{s1}—S(O)₂S— is

[chemical structure]

(TTS). In some embodiments, R^{s1}—S(O)₂S— is

[chemical structure]

(NO₂PheTS). In some embodiments, R^{s1}—S(O)₂S— is

[chemical structure]

(p-ClPheTS). In some embodiments R^{s1}—S(O)₂S— is

[chemical structure]

(o-ClPheTS). In some embodiments, R^{s1}—S(O)₂S— is

[chemical structure]

(2,4,6-TriClPheTS). In some embodiments, R^{s1}—S(O)₂S— is

[chemical structure]

(PheTS). In some embodiments, R^{s1}—S(O)₂S— is

[chemical structure]

(PFPheTS). In some embodiments, R^{s1}—S(O)₂S— is

[chemical structure]

(a-CNMTS). In some embodiments, R^{s1}—S(O)₂S— is

[chemical structure]

(a-NO₂MTS). In some embodiments, R^{s1}—S(O)₂S— is

[chemical structure]

(a-CF₃MTS). In some embodiments, R^{s1}—S(O)₂S— is

[chemical structure]

(a-CF₃TS). In some embodiments, R^{s1}—S(O)₂S— is

[chemical structure]

(a-CHF₂TS). In some embodiments, R^{s1}—S(O)₂S— is

[chemical structure]

(a-CH₂FTS).

[1039] In some embodiments, the sulfurizing reagent has the structure of S-I or S-II, wherein L is —S—R^{L3}— or —S—C(O)—R^{L3}—. In some embodiments, L is —S—R^{L3}— or —S—C(O)—R^{L3}—, wherein R^{L3} is an optionally substituted C₁-C₆ alkylene. In some embodiments, L is —S—R^{L3}— or —S—C(O)—R^{L3}—, wherein R^{L3} is an optionally substituted C₁-C₆ alkenylene. In some embodiments, L is —S—R^{L3}— or —S—C(O)—R^{L3}—, wherein R^{L3} is an optionally substituted C₁-C₆ alkylene wherein one or more methylene units are optionally and independently replaced by an optionally substituted C₁-C₆ alkenylene, arylene, or heteroarylene. In some embodiments, In some embodiments, R^{L3} is an optionally substituted —S—(C₁-C₆ alkenylene)-, —S—(C₁-C₆ alkylene)-, —S—(C₁-C₆ alkylene)-arylene-(C₁-C₆ alkylene)-, —S—CO-arylene-(C₁-C₆ alkylene)-, or —S—CO—(C₁-C₆ alkylene)-arylene-(C₁-C₆ alkylene)-. In some embodiments, the sulfurizing reagent has the structure of S-I or S-II, wherein L is —S—R^{L3}— or —S—C(O)—R^{L3}—, and the sulfur atom is connected to R¹.

[1040] In some embodiments, the sulfurizing reagent has the structure of S-I or S-II, wherein L is alkylene, alkenylene, arylene or heteroarylene.

[1041] In some embodiments, the sulfurizing reagent has the structure of S-I or S-II, wherein L is

[chemical structure]

In some embodiments, L is

[chemical structure]

wherein the sulfur atom is connected to R¹.

[1042] In some embodiments, the sulfurizing reagent has the structure of S-I or S-II, wherein R¹ is

[chemical structure]

In some embodiments, R¹ is

[chemical structure]

wherein the sulfur atom is connected to L.

[1043] In some embodiments, the sulfurizing reagent has the structure of S-I or S-II, wherein L is

[chemical structure]

wherein the sulfur atom is connected to R¹; and R¹ is

[chemical structure]

wherein the sulfur atom is connected to L.

[1044] In some embodiments, the sulfurizing reagent has the structure of S-I or S-II, wherein R¹ is —S—R^{L2}, wherein R^{L2} is as defined and described above and herein. In some embodiments, R^{L2} is an optionally substituted group selected from —S—(C₁-C₆ alkylene)-heterocyclyl, —S—(C₁-C₆ alkenylene)-heterocyclyl, —S—(C₁-C₆ alkylene)-N(R′)₂, —S—(C₁-C₆ alkylene)-N(R′)₃, wherein each R′ is as defined above and described herein.

[1045] In some embodiments, -L-R¹ is —R^{L3}—S—S—R^{L2}, wherein each variable is independently as defined above and described herein. In some embodiments, -L-R¹ is —R^{L3}—C(O)—S—S—R^{L2}, wherein each variable is independently as defined above and described herein.

[1046] Exemplary bis(thiosulfonate) reagents of formula S-II are depicted below:

[chemical structure]

[1047] In some embodiments, the sulfurization reagent is a compound having one of the following formulae:

S₈, R^{s2}—S—S—R^{s3}, or R^{s2}—S—X^{s}—R^{s3},

wherein:
[1048] each of R^{s2} and R^{s3} is independently an optionally substituted group selected from aliphatic, aminoalkyl, carbocyclyl, heterocyclyl, heterocycloalkyl, aryl, heteroaryl, alkyloxy, aryloxy, heteroaryloxy, acyl, amide, imide, or thiocarbonyl; or
   [1049] R^{s2} and R^{s3} are taken together with the atoms to which they are bound to form an optionally substituted heterocyclic or heteroaryl ring;
[1050] X^{s} is —S(O)₂—, —O—, or —N(R′)—; and
[1051] R′ is as defined and described above and herein.

[1052] In some embodiments, the sulfurization reagent is S₈,

[chemical structure]

In some embodiments, the sulfurization reagent is S₈,

[chemical structure]

In some embodiments, the sulfurization reagent is

[chemical structure]

[1053] Exemplary sulfuring reagents am depicted in Table 5 below.

TABLE 5
Exemplary sulfurization reagents.

[chemical structure]

[chemical structure]

[chemical structure]

[chemical structure]

[chemical structure]

[chemical structure]

[chemical structure]

[chemical structure]

[chemical structure]

[chemical structure]

[chemical structure]

[chemical structure]

[chemical structure]

[chemical structure]

[chemical structure]

[chemical structure]

[chemical structure]

[chemical structure]

[chemical structure]

[chemical structure]

[chemical structure]

[chemical structure]

[chemical structure]

[chemical structure]

[chemical structure]

[chemical structure]

[chemical structure]

[chemical structure]

[chemical structure]

S₈

[chemical structure]

[chemical structure]

[chemical structure]

[chemical structure]

[chemical structure]

[chemical structure]

[chemical structure]

[chemical structure]

[chemical structure]

[chemical structure]

[chemical structure]

[chemical structure]

[chemical structure]

[chemical structure]

[chemical structure]

[chemical structure]

[chemical structure]

[chemical structure]

[chemical structure]

[chemical structure]

[chemical structure]

[1054] In some embodiments, a provided sulfurization reagent is used to modify an H-phosphonate. For instance, in some embodiments, an H-phosphonate oligonucleotide is synthesized using, e.g., a method of Wada I or Wada II, and is modified using a sulfurization reagent of formula S-I or S-II:

[chemical structure]

wherein each of R^{S1}, L, and R¹ are as described and defined above and herein.

[1055] In some embodiments, the present invention provides a process for synthesizing a phosphorothioate triester, comprising steps of:
[1056] i) reacting an H-phosphonate of structure:

[chemical structure]

[1057] wherein each of W, Y, and Z are as described and defined above and herein, with a silylating reagent to provide a silyloxyphosphonate; and
[1058] ii) reacting the silyloxyphosphonate with a sulfurization reagent of structure S-I or S-II:

[chemical structure]

[1059] to provide a phosphorothiotriester.

[1060] In some embodiments, a selenium electrophile is used instead of a sulfurizing reagent to introduce modification to the internucleotidic linkage. In some embodiments, a selenium electrophile is a compound having one of the following formulae:

S₈, R^{s2}—Se—Se—R^{s3}, or R^{s2}—Se—X^{s}—R^{s3},

wherein:
[1061] each of R^{s2} and R^{s3} is independently an optionally substituted group selected from aliphatic, aminoalkyl, carbocyclyl, heterocyclyl, heterocycloalkyl, aryl, heteroaryl, alkyloxy, aryloxy, heteroaryloxy, acyl, amide, imide, or thiocarbonyl; or
   [1062] R^{s2} and R^{s3} are taken together with the atoms to which they are bound to form an optionally substituted heterocyclic or heteroaryl ring;
[1063] X^{s} is —S(O)₂—, —O—, or —N(R′)—; and
[1064] R′ is as defined and described above and herein.

[1065] In other embodiments, the selenium electrophile is a compound of Se, KSeCN,

[chemical structure]

In some embodiments, the selenium electrophile is Se or

[chemical structure]

[1066] In some embodiments, a sulfurization reagent for use in accordance with the present invention is characterized in that the moiety transferred to phosphorus during sulfurization is a substituted sulfur (e.g., —SR) as opposed to a single sulfur atom (e.g., —S⁻ or ═S).

[1067] In some embodiments, a sulfurization reagent for use in accordance with the present invention is characterized in that the activity of the reagent is tunable by modifying the reagent with a certain electron withdrawing or donating group.

[1068] In some embodiments, a sulfurization reagent for use in accordance with the present invention is characterized in that it is crystalline. In some embodiments, a sulfurization reagent for use in accordance with the present invention is characterized in that it has a high degree of crystallinity. In certain embodiments, a sulfurization reagent for use in accordance with the present invention is characterized by ease of purification of the reagent via, e.g., recrystallization. In certain embodiments, a sulfurization reagent for use in accordance with the present invention is characterized in that it is substantially free from sulfur-containing impurities. In some embodiments, sulfurization reagents which are substantially free from sulfur-containing impurities show increased efficiency.

[1069] In some embodiments, the provided chirally controlled oligonucleotide comprises one or more phosphate diester linkages. To synthesize such chirally controlled oligonucleotides, one or more modifying steps are optionally replaced with an oxidation step to install the corresponding phosphate diester linkages. In some embodiments, the oxidation step is performed in a fashion similar to ordinary oligonucleotide synthesis. In some embodiments, an oxidation step comprises the use of 12. In some embodiments, an oxidation step comprises the use of 12 and pyridine. In some embodiments, an oxidation step comprises the use of 0.02 M 12 in a THF/pyridine/water (70:20:10—v/v/v) co-solvent system. An exemplary cycle is depicted in Scheme I-c.

[1070] In some embodiments, a phosphorothioate precursor is used to synthesize chirally controlled oligonucleotides comprising phosphorothioate linkages. In some embodiments, such a phosphorothioate precursor is

[chemical structure]

In some embodiments,

[chemical structure]

is converted into phosphorothioate diester linkages during standard deprotection/release procedure after cycle exit. Examples are further depicted below.

[1071] In some embodiments, the provided chirally controlled oligonucleotide comprises one or more phosphate diester linkages and one or more phosphorothioate diester linkages. In some embodiments, the provided chirally controlled oligonucleotide comprises one or more phosphate diester linkages and one or more phosphorothioate diester linkages, wherein at least one phosphate diester linkage is installed after all the phosphorothioate diester linkages when synthesized from 3′ to 5′. To synthesize such chirally controlled oligonucleotides, in some embodiments, one or more modifying steps are optionally replaced with an oxidation step to install the corresponding phosphate diester linkages, and a phosphorothioate precursor is installed for each of the phosphorothioate diester linkages. In some embodiments, a phosphorothioate precursor is converted to a phosphorothioate diester linkage after the desired oligonucleotide length is achieved. In some embodiments, the deprotection/release step during or after cycle exit converts the phosphorothioate precursors into phosphorothioate diester linkages. In some embodiments, a phosphorothioate precursor is characterized in that it has the ability to be removed by a beta-elimination pathway. In some embodiments, a phosphorothioate precursor is

[chemical structure]

As understood by one of ordinary skill in the art, one of the benefits of using a phosphorothioate precursor, for instance,

[chemical structure]

during synthesis is that

[chemical structure]

is more stable than phosphorothioate in certain conditions.

[1072] In some embodiments, a phosphorothioate precursor is a phosphorus protecting group as described herein, e.g., 2-cyanoethyl (CE or Cne), 2-trimethylsilylethyl, 2-nitroethyl, 2-sulfonylethyl, methyl, benzyl, o-nitrobenzyl, 2-(p-nitrophenyl)ethyl (NPE or Npe), 2-phenylethyl, 3-(N-tert-butylcarboxamido)-1-propyl, 4-oxopentyl, 4-methylthio-1-butyl, 2-cyano-1,1-dimethylethyl, 4-N-methylaminobutyl, 3-(2-pyridyl)-1-propyl, 2-[N-methyl-N-(2-pyridyl)]aminoethyl, 2-(N-formyl,N-methyl)aminoethyl, 4-[N-methyl-N-(2,2,2-trifluoroacetyl)amino]butyl. Examples are further depicted below.

[1073] Methods for synthesizing a desired sulfurization reagent are described herein and in the examples section.

[1074] As noted above, in some embodiments, sulfurization occurs under conditions which cleave the chiral reagent from the growing oligonucleotide. In some embodiments, sulfurization occurs under conditions which do not cleave the chiral reagent from the growing oligonucleotide.

[1075] In some embodiments, a sulfurization reagent is dissolved in a suitable solvent and delivered to the column. In certain embodiments, the solvent is a polar aprotic solvent such as a nitrile solvent. In some embodiments, the solvent is acetonitrile. In some embodiments, a solution of sulfurization reagent is prepared by mixing a sulfurization reagent (e.g., a thiosulfonate derivative as described herein) with BSTFA (N,O-bis-trimethylsilyl-trifluoroacetamide) in a nitrile solvent (e.g., acetonitrile). In some embodiments, BSTFA is not included. For example, the present inventors have found that relatively more reactive sulfurization reagents of general formula R^{s2}—S—S(O)₂—R³ can often successfully participate in sulfurization reactions in the absence of BSTFA. To give but one example, the inventors have demonstrated that where R^{s2} is p-nitrophenyl and R^{s3} is methyl then no BSTFA is required. In light of this disclosure, those skilled in the art will readily be able to determine other situations and/or sulfurization reagents that do not require BSTFA.

[1076] In some embodiments, the sulfurization step is performed at room temperature. In some embodiments, the sulfurization step is performed at lower temperatures such as about 0° C., about 5° C., about 10° C., or about 15° C. In some embodiments, the sulfurization step is performed at elevated temperatures of greater than about 20° C.

[1077] In some embodiments, a sulfurization reaction is run for about 1 minute to about 120 minutes. In some embodiments, a sulfurization reaction is run for about 1 minute to about 90 minutes. In some embodiments, a sulfurization reaction is run for about 1 minute to about 60 minutes. In some embodiments, a sulfurization reaction is run for about 1 minute to about 30 minutes. In some embodiments, a sulfurization reaction is run for about 1 minute to about 25 minutes. In some embodiments, a sulfurization reaction is run for about 1 minute to about 20 minutes. In some embodiments, a sulfurization reaction is run for about 1 minute to about 15 minutes. In some embodiments, a sulfurization reaction is run for about 1 minute to about 10 minutes. In some embodiments, a sulfurization reaction is run for about 5 minute to about 60 minutes.

[1078] In some embodiments, a sulfurization reaction is run for about 5 minutes. In some embodiments, a sulfurization reaction is run for about 10 minutes. In some embodiments, a sulfurization reaction is run for about 15 minutes. In some embodiments, a sulfurization reaction is run for about 20 minutes. In some embodiments, a sulfurization reaction is run for about 25 minutes. In some embodiments, a sulfurization reaction is run for about 30 minutes. In some embodiments, a sulfurization reaction is run for about 35 minutes. In some embodiments, a sulfurization reaction is run for about 40 minutes. In some embodiments, a sulfurization reaction is run for about 45 minutes. In some embodiments, a sulfurization reaction is run for about 50 minutes. In some embodiments, a sulfurization reaction is run for about 55 minutes. In some embodiments, a sulfurization reaction is run for about 60 minutes.

[1079] It was unexpectedly found that certain of the sulfurization modification products made in accordance with methods of the present invention are unexpectedly stable. In some embodiments, it the unexpectedly stable products are phosphorothioate triesters. In some embodiments, the unexpectedly stable products are chirally controlled oligonucleotides comprising one or more internucleotidic linkages having the structure of formula I-c.

[1080] One of skill in the relevant arts will recognize that sulfurization methods described herein and sulfurization reagents described herein are also useful in the context of modifying H-phosphonate oligonucleotides such as those described in Wada II (WO2010/064146).

[1081] In some embodiments, the sulfurization reaction has a stepwise sulfurization efficiency that is at least about 80%, 85%, 90%, 95%, 96%, 97%, or 98%. In some embodiments, the sulfurization reaction provides a crude dinucleotide product composition that is at least 98% pure. In some embodiments, the sulfurization reaction provides a crude tetranucleotide product composition that is at least 90% pure. In some embodiments, the sulfurization reaction provides a crude dodecanucleotide product composition that is at least 70% pure. In some embodiments, the sulfurization reaction provides a crude icosanucleotide product composition that is at least 50% pure.

[1082] Once the step of modifying the linkage phosphorus is complete, the oligonucleotide undergoes another deblock step in preparation for re-entering the cycle. In some embodiments, a chiral auxiliary remains intact after sulfurization and is deblocked during the subsequent deblock step, which necessarily occurs prior to re-entering the cycle. The process of deblocking, coupling, capping, and modifying, are repeated until the growing oligonucleotide reaches a desired length, at which point the oligonucleotide can either be immediately cleaved from the solid support or left attached to the support for purification purposes and later cleaved. In some embodiments, one or more protecting groups are present on one or more of the nucleotide bases, and cleavage of the oligonucleotide from the support and deprotection of the bases occurs in a single step. In some embodiments, one or more protecting groups are present on one or more of the nucleotide bases, and cleavage of the oligonucleotide from the support and deprotection of the bases occurs in more than one steps. In some embodiments, deprotection and cleavage from the support occurs under basic conditions using, e.g., one or more amine bases. In certain embodiments, the one or more amine bases comprise propyl amine. In certain embodiments, the one or more amine bases comprise pyridine.

[1083] In some embodiments, cleavage from the support and/or deprotection occurs at elevated temperatures of about 30° C. to about 90° C. In some embodiments, cleavage from the support and/or deprotection occurs at elevated temperatures of about 40° C. to about 80° C. In some embodiments, cleavage from the support and/or deprotection occurs at elevated temperatures of about 50° C. to about 70° C. In some embodiments, cleavage from the support and/or deprotection occurs at elevated temperatures of about 60° C. In some embodiments, cleavage from the support and/or deprotection occurs at ambient temperatures.

[1084] Exemplary purification procedures are described herein and/or are known generally in the relevant arts.

[1085] Noteworthy is that the removal of the chiral auxiliary from the growing oligonucleotide during each cycle is beneficial for at least the reasons that (1) the auxiliary will not have to be removed in a separate step at the end of the oligonucleotide synthesis when potentially sensitive functional groups are installed on phosphorus; and (2) unstable phosphorus-auxiliary intermediates prone to undergoing side reactions and/or interfering with subsequent chemistry are avoided. Thus, removal of the chiral auxiliary during each cycle makes the overall synthesis more efficient.

[1086] While the step of deblocking in the context of the cycle is described above, additional general methods are included below.

### Deblocking Step

[1087] In some embodiments, the step of coupling is preceded by a step of deblocking. For instance, in some embodiments, the 5′ hydroxyl group of the growing oligonucleotide is blocked (i.e., protected) and must be deblocked in order to subsequently react with a nucleoside coupling partner.

[1088] In some embodiments, acidification is used to remove a blocking group. In some embodiments, the acid is a Brønsted acid or Lewis acid. Useful Brønsted acids are carboxylic acids, alkylsulfonic acids, arylsulfonic acids, phosphoric acid and its derivatives, phosphonic acid and its derivatives, alkylphosphonic acids and their derivatives, arylphosphonic acids and their derivatives, phosphinic acid, dialkylphosphinic acids, and diarylphosphinic acids which have a pKa (25° C. in water) value of −0.6 (trifluoroacetic acid) to 4.76 (acetic acid) in an organic solvent or water (in the case of 80% acetic acid). The concentration of the acid (1 to 80%) used in the acidification step depends on the acidity of the acid. Consideration to the acid strength must be taken into account as strong acid conditions will result in depurination/depyrimidination, wherein purinyl or pyrimidinyl bases are cleaved from ribose ring and or other sugar ring. In some embodiments, an acid is selected from R^{a1}COOH, R^{a1}SO₃H, R^{a3}SO₃H,

[chemical structure]

wherein each of R^{a1} and R^{a2} is independently hydrogen or an optionally substituted alkyl or aryl, and R^{a3} is an optionally substituted alkyl or aryl.

[1089] In some embodiments, acidification is accomplished by a Lewis acid in an organic solvent. Exemplary such useful Lewis acids are Zn(X^{a})₂ wherein X^{a} is Cl, Br, I, or CF₃SO₃.

[1090] In some embodiments, the step of acidifying comprises adding an amount of a Brønsted or Lewis acid effective to remove a blocking group without removing purine moieties from the condensed intermediate.

[1091] Acids that are useful in the acidifying step also include, but are not limited to 10% phosphoric acid in an organic solvent, 10% hydrochloric acid in an organic solvent, 1% trifluoroacetic acid in an organic solvent, 3% dichloroacetic acid or trichloroacetic acid in an organic solvent or 80% acetic acid in water. The concentration of any Brønsted or Lewis acid used in this step is selected such that the concentration of the acid does not exceed a concentration that causes cleavage of a nucleobase from a sugar moiety.

[1092] In some embodiments, acidification comprises adding 1% trifluoroacetic acid in an organic solvent. In some embodiments, acidification comprises adding about 0.1% to about 8% trifluoroacetic acid in an organic solvent. In some embodiments, acidification comprises adding 3% dichloroacetic acid or trichloroacetic acid in an organic solvent. In some embodiments, acidification comprises adding about 0.1% to about 10% dichloroacetic acid or trichloroacetic acid in an organic solvent. In some embodiments, acidification comprises adding 3% trichloroacetic acid in an organic solvent. In some embodiments, acidification comprises adding about 0.1% to about 10% trichloroacetic acid in an organic solvent. In some embodiments, acidification comprises adding 80% acetic acid in water. In some embodiments, acidification comprises adding about 50% to about 90%, or about 50% to about 80%, about 50% to about 70%, about 50% to about 60%, about 70% to about 90% acetic acid in water. In some embodiments, the acidification comprises the further addition of cation scavengers to an acidic solvent. In certain embodiments, the cation scavengers can be triethylsilane or triisopropylsilane. In some embodiments, a blocking group is deblocked by acidification, which comprises adding 1% trifluoroacetic acid in an organic solvent. In some embodiments, a blocking group is deblocked by acidification, which comprises adding 3% dichloroacetic acid in an organic solvent. In some embodiments, a blocking group is deblocked by acidification, which comprises adding 3% trichloroacetic acid in an organic solvent. In some embodiments, a blocking group is deblocked by acidification, which comprises adding 3% trichloroacetic acid in dichloromethane.

[1093] In certain embodiments, methods of the present invention are completed on a synthesizer and the step of deblocking the hydroxyl group of the growing oligonucleotide comprises delivering an amount solvent to the synthesizer column, which column contains a solid support to which the oligonucleotide is attached. In some embodiments, the solvent is a halogenated solvent (e.g., dichloromethane). In certain embodiments, the solvent comprises an amount of an acid. In some embodiments, the solvent comprises an amount of an organic acid such as, for instance, trichloroacetic acid. In certain embodiments, the acid is present in an amount of about 1% to about 20% w/v. In certain embodiments, the acid is present in an amount of about 1% to about 10% w/v. In certain embodiments, the acid is present in an amount of about 1% to about 5% w/v. In certain embodiments, the acid is present in an amount of about 1 to about 3% w/v. In certain embodiments, the acid is present in an amount of about 3% w/v. Methods for deblocking a hydroxyl group are described further herein. In some embodiments, the acid is present in 3% w/v is dichloromethane.

[1094] In some embodiments, the chiral auxiliary is removed before the deblocking step. In some embodiments, the chiral auxiliary is removed during the deblocking step.

[1095] In some embodiments, cycle exit is performed before the deblocking step. In some embodiments, cycle exit is preformed after the deblocking step.

### General Conditions for Blocking Group/Protecting Group Removal

[1096] Functional groups such as hydroxyl or amino moieties which are located on nucleobases or sugar moieties are routinely blocked with blocking (protecting) groups (moieties) during synthesis and subsequently deblocked. In general, a blocking group renders a chemical functionality of a molecule inert to specific reaction conditions and can later be removed from such functionality in a molecule without substantially damaging the remainder of the molecule (see e.g., Green and Wuts, Protective Groups in Organic Synthesis, 2nd Ed., John Wiley & Sons, New York, 1991). For example, amino groups can be blocked with nitrogen blocking groups such as phthalimido, 9-fluorenylmethoxycarbonyl (FMOC), triphenylmethylsulfenyl, t-BOC, 4,4′-dimethoxytrityl (DMTr), 4-methoxytrityl (MMTr), 9-phenylxanthin-9-yl (Pixyl), trityl (Tr), or 9-(p-methoxyphenyl)xanthin-9-yl (MOX). Carboxyl groups can be protected as acetyl groups. Hydroxy groups can be protected such as tetrahydropyranyl (THP), t-butyldimethylsilyl (TBDMS), 1-[(2-chloro-4-methyl)phenyl]-4-methoxypiperidin-4-yl (Ctmp), 1-(2-fluorophenyl)-4-methoxypiperidin-4-yl (Fpmp), 1-(2-chloroethoxy)ethyl, 3-methoxy-1,5-dicarbomethoxypentan-3-yl (MDP), bis(2-acetoxyethoxy)methyl (ACE), triisopropylsilyloxymethyl (TOM), 1-(2-cyanoethoxy)ethyl (CEE), 2-cyanoethoxymethyl (CEM), [4-(N-dichloroacetyl-N-methylamino)benzyloxy]methyl, 2-cyanoethyl (CN), pivaloyloxymethyl (PivOM), levunyloxymethyl (ALE). Other representative hydroxyl blocking groups have been described (see e.g., Beaucage et al., Tetrahedron, 1992, 46, 2223). In some embodiments, hydroxyl blocking groups are acid-labile groups, such as the trityl, monomethoxytrityl, dimethoxytrityl, trimethoxytrityl, 9-phenylxanthin-9-yl (Pixyl) and 9-(p-methoxyphenyl)xanthin-9-yl (MOX). Chemical functional groups can also be blocked by including them in a precursor form. Thus an azido group can be considered a blocked form of an amine as the azido group is easily converted to the amine. Further representative protecting groups utilized in nucleic acid synthesis are known (see e.g. Agrawal et al., Protocols for Oligonucleotide Conjugates, Eds., Humana Press, New Jersey, 1994, Vol. 26, pp. 1-72).

[1097] Various methods are known and used for removal of blocking groups from nucleic acids. In some embodiments, all blocking groups are removed. In some embodiments, a portion of blocking groups are removed. In some embodiments, reaction conditions can be adjusted to selectively remove certain blocking groups.

[1098] In some embodiments, nucleobase blocking groups, if present, are cleavable with an acidic reagent after the assembly of a provided oligonucleotide. In some embodiment, nucleobase blocking groups, if present, are cleavable under neither acidic nor basic conditions, e.g. cleavable with fluoride salts or hydrofluoric acid complexes. In some embodiments, nucleobase blocking groups, if present, are cleavable in the presence of base or a basic solvent after the assembly of a provided oligonucleotide. In certain embodiments, one or more of the nucleobase blocking groups are characterized in that they are cleavable in the presence of base or a basic solvent after the assembly of a provided oligonucleotide but are stable to the particular conditions of one or more earlier deprotection steps occurring during the assembly of the provided oligonucleotide.

[1099] In some embodiments, blocking groups for nucleobases are not required. In some embodiments, blocking groups for nucleobases are required. In some embodiments, certain nucleobases require one or more blocking groups while other nucleobases do not require one or more blocking groups.

[1100] In some embodiments, the oligonucleotide is cleaved from the solid support after synthesis. In some embodiments, cleavage from the solid support comprises the use of propylamine. In some embodiments, cleavage from the solid support comprises the use of propylamine in pyridine. In some embodiments, cleavage from the solid support comprises the use of 20% propylamine in pyridine. In some embodiments, cleavage from the solid support comprises the use of propylamine in anhydrous pyridine. In some embodiments, cleavage from the solid support comprises the use of 20% propylamine in anhydrous pyridine. In some embodiments, cleavage from the solid support comprises use of a polar aprotic solvent such as acetonitrile, NMP, DMSO, sulfone, and/or lutidine. In some embodiments, cleavage from the solid support comprises use of solvent, e.g., a polar aprotic solvent, and one or more primary amines (e.g., a C₁₋₁₀ amine), and/or one or more of methoxylamine, hydrazine, and pure anhydrous ammonia.

[1101] In some embodiments, deprotection of oligonucleotide comprises the use of propylamine. In some embodiments, deprotection of oligonucleotide comprises the use of propylamine in pyridine. In some embodiments, deprotection of oligonucleotide comprises the use of 20% propylamine in pyridine. In some embodiments deprotection of oligonucleotide comprises the use of propylamine in anhydrous pyridine. In some embodiments, deprotection of oligonucleotide comprises the use of 20% propylamine in anhydrous pyridine.

[1102] In some embodiments, the oligonucleotide is deprotected during cleavage.

[1103] In some embodiments, cleavage of oligonucleotide from solid support, or deprotection of oligonucleotide, is performed at about room temperature. In some embodiments, cleavage of oligonucleotide from solid support, or deprotection of oligonucleotide, is performed at elevated temperature. In some embodiments, cleavage of oligonucleotide from solid support, or deprotection of oligonucleotide, is performed at above about 30° C., 40° C., 50° C., 60° C., 70° C., 80° C. 90° C. or 100° C. In some embodiments, cleavage of oligonucleotide from solid support, or deprotection of oligonucleotide, is performed at about 30° C., 40° C., 50° C., 60° C., 70° C., 80° C. 90° C. or 100° C. In some embodiments, cleavage of oligonucleotide from solid support, or deprotection of oligonucleotide, is performed at about 40-80° C. In some embodiments, cleavage of oligonucleotide from solid support, or deprotection of oligonucleotide, is performed at about 50-70° C. In some embodiments, cleavage of oligonucleotide from solid support, or deprotection of oligonucleotide, is performed at about 60° C.

[1104] In some embodiments, cleavage of oligonucleotide from solid support, or deprotection of oligonucleotide, is performed for more than 0.1 hr, 1 hr, 2 hrs, 5 hrs, 10 hrs, 15 hrs, 20 hrs, 24 hrs, 30 hrs, or 40 hrs. In some embodiments, cleavage of oligonucleotide from solid support, or deprotection of oligonucleotide, is performed for about 0.1-5 hrs. In some embodiments, cleavage of oligonucleotide from solid support, or deprotection of oligonucleotide, is performed for about 3-10 hrs. In some embodiments, cleavage of oligonucleotide from solid support, or deprotection of oligonucleotide, is performed for about 5-15 hrs. In some embodiments, cleavage of oligonucleotide from solid support, or deprotection of oligonucleotide, is performed for about 10-20 hrs. In some embodiments, cleavage of oligonucleotide from solid support, or deprotection of oligonucleotide, is performed for about 15-25 hrs. In some embodiments, cleavage of oligonucleotide from solid support, or deprotection of oligonucleotide, is performed for about 20-40 hrs. In some embodiments, cleavage of oligonucleotide from solid support, or deprotection of oligonucleotide, is performed for about 2 hrs. In some embodiments, cleavage of oligonucleotide from solid support, or deprotection of oligonucleotide, is performed for about 5 hrs. In some embodiments, cleavage of oligonucleotide from solid support, or deprotection of oligonucleotide, is performed for about 10 hrs. In some embodiments, cleavage of oligonucleotide from solid support, or deprotection of oligonucleotide, is performed for about 15 hrs. In some embodiments, cleavage of oligonucleotide from solid support, or deprotection of oligonucleotide, is performed for about 18 hrs. In some embodiments, cleavage of oligonucleotide from solid support, or deprotection of oligonucleotide, is performed for about 24 hrs.

[1105] In some embodiments, cleavage of oligonucleotide from solid support, or deprotection of oligonucleotide, is performed at room temperature for more than 0.1 hr, 1 hr, 2 hrs, 5 hrs, 10 hrs, 15 hrs, 20 hrs, 24 hrs, 30 hrs, or 40 hrs. In some embodiments, cleavage of oligonucleotide from solid support, or deprotection of oligonucleotide, is performed at room temperature for about 5-48 hrs. In some embodiments, cleavage of oligonucleotide from solid support, or deprotection of oligonucleotide, is performed at room temperature for about 10-24 hrs. In some embodiments, cleavage of oligonucleotide from solid support, or deprotection of oligonucleotide, is performed at room temperature for about 18 hrs. In some embodiments, cleavage of oligonucleotide from solid support, or deprotection of oligonucleotide, is performed at elevated temperature for more than 0.1 hr, 1 hr, 2 hrs, 5 hrs, 10 hrs, 15 hrs, 20 hrs, 24 hrs, 30 hrs, or 40 hrs. In some embodiments, cleavage of oligonucleotide from solid support, or deprotection of oligonucleotide, is performed at elevated temperature for about 0.5-5 hrs. In some embodiments, cleavage of oligonucleotide from solid support, or deprotection of oligonucleotide, is performed at about 60° C. for about 0.5-5 hrs. In some embodiments, cleavage of oligonucleotide from solid support, or deprotection of oligonucleotide, is performed at about 60° C. for about 2 hrs.

[1106] In some embodiments, cleavage of oligonucleotide from solid support, or deprotection of oligonucleotide comprises the use of propylamine and is performed at room temperature or elevated temperature for more than 0.1 hr, 1 hr, 2 hrs, 5 hrs, 10 hrs, 15 hrs, 20 hrs, 24 hrs, 30 hrs, or 40 hrs. Exemplary conditions are 20% propylamine in pyridine at room temperature for about 18 hrs, and 20% propylamine in pyridine at 60° C. for about 18 hrs,

[1107] In some embodiments, the present invention provides methods for making a chirally controlled oligonucleotide comprising steps of:
[1108] (1) coupling;
[1109] (2) capping;
[1110] (3) modifying;
[1111] (4) deblocking; and
[1112] (5) repeating steps (1)-(4) until a desired length is achieved;
   wherein the chirally controlled oligonucleotide comprises at least one phosphorothioate diester linkage or at least one internucleotidic linkage having the structure of formula I-c.

[1113] In some embodiments, the present invention provides methods for making a chirally controlled oligonucleotide comprising steps of:
[1114] (1) coupling;
[1115] (2) capping;
[1116] (3) modifying;
[1117] (4) deblocking; and
[1118] (5) repeating steps (1)-(4) until a desired length is achieved;
   wherein:
   at least one cycle of (1) to (4) forms an phosphorothioate diester linkage.

[1119] In some embodiments, the present invention provides methods for making a chirally controlled oligonucleotide comprising steps of:
[1120] (1) coupling;
[1121] (2) capping;
[1122] (3) modifying;
[1123] (4) deblocking; and
[1124] (5) repeating steps (1)-(4) until a desired length is achieved;
   wherein:
   at least one cycle of (1) to (4) forms an internucleotidic linkage having the structure of formula I-c.

[1125] In some embodiments, the present invention provides methods for making a chirally controlled oligonucleotide comprising steps of:
[1126] (1) coupling;
[1127] (2) capping;
[1128] (3) modifying;
[1129] (4) deblocking; and
[1130] (5) repeating steps (1)-(4) until a desired length is achieved;
   wherein:
   the coupling step comprises the use of an activating group and

[chemical structure]

wherein B^{PRO} is a protected nucleobase;
[1131] the capping step comprising capping of the amino group in the chiral auxiliary and the capping of unreacted 5′-OH;
[1132] the modifying step comprising installation of —S-L-R¹ group to the linkage phosphorus, wherein each of L and R¹ is independently as defined above and described herein;
[1133] the delocking step comprising the use of an acid.

[1134] In some embodiments, the present invention provides methods for making a chirally controlled oligonucleotide comprising steps of:
[1135] (1) coupling;
[1136] (2) capping;
[1137] (3) modifying;
[1138] (4) deblocking; and
[1139] (5) repeating steps (1)-(4) until a desired length is achieved;
   wherein:
[1140] the coupling step comprises the use of CMPT and

[chemical structure]

wherein B_{PRO} is a protected nucleobase;
[1141] the capping step comprising capping of the amino group in the chiral auxiliary and the capping of unreacted 5′-OH;
[1142] the modifying step comprising installation of —S-L-R¹ group to the linkage phosphorus, wherein each of L and R¹ is independently as defined above and described herein; the delocking step comprising the use of an acid.

[1143] In some embodiments, an activator is a “Wada” activator, i.e., the activator is from any one of Wada I, II, or III documents cited above.

[1144] Exemplary activating groups are depicted below:

[chemical structure]

[1145] An exemplary cycle is depicted in Scheme I-b.

[chemical structure]

[1146] In some embodiments, the present invention provides methods for making a chirally controlled oligonucleotide comprising steps of:
[1147] (1) coupling;
[1148] (2) capping;
[1149] (3) modifying;
[1150] (4) deblocking; and
[1151] (5) repeating steps (1)-(4) until a desired length is achieved;
   wherein:
   the chirally controlled oligonucleotide comprises at least one phosphorothioate diester linkage or at least one internucleotidic linkage of formula I-c, and at least one phosphate diester internucleotidic linkage; and
   at least one modifying step is replaced by an oxidation step.

[1152] In some embodiments, the present invention provides methods for making a chirally controlled oligonucleotide comprising steps of:
[1153] (1) coupling;
[1154] (2) capping;
[1155] (3) modifying;
[1156] (4) deblocking; and
[1157] (5) repeating steps (1)-(4) until a desired length is achieved;
   wherein:
   the chirally controlled oligonucleotide comprises at least one phosphorothioate diester linkage or at least one internucleotidic linkage of formula I-c, and at least one phosphate diester internucleotidic linkage; and
   at least one modifying step is replaced by an oxidization step comprising the use of 12.

[1158] An exemplary cycle is illustrated in Scheme I-c.

[chemical structure]

[chemical structure]

[1159] In Scheme I-c, oligonucleotide (or nucleotide, or oligonucleotide with modified internucleotidic linkage) on solid support (C-1) is coupled with phosphoramidite C-2. After coupling and capping, an oxidation step is performed. After deblocking, a phosphate diester linkage is formed. The cycle product C-3 can either re-enter cycle C to install more phosphate diester linkage, or enter other cycles to install other types of internucleotidic linkages, or go to cycle exit.

[1160] In some embodiments, non-chirally pure phosphoramidite can be used instead of C-2 in Scheme I-c. In some embodiments, p-cyanoethylphosphoramidites protected with DMTr is used. In some embodiments, the phosphoramidite being used has the structure of

[chemical structure]

[1161] In some embodiments, the present invention provides methods for making a chirally controlled oligonucleotide comprising steps of:
[1162] (1) coupling;
[1163] (2) capping;
[1164] (3) modifying;
[1165] (4) deblocking; and
[1166] (5) repeating steps (1)-(4) until a desired length is achieved;
   wherein:
   the chirally controlled oligonucleotide comprises one or more phosphorothioate diester linkages; and
   one or more phosphorothioate diester precursors are formed for each of the corresponding phosphorothioate diester linkage.

[1167] In some embodiments, the present invention provides methods for making a chirally controlled oligonucleotide comprising steps of:
[1168] (1) coupling;
[1169] (2) capping;
[1170] (3) modifying;
[1171] (4) deblocking; and
[1172] (5) repeating steps (1)-(4) until a desired length is achieved;
   wherein:
   the chirally controlled oligonucleotide comprises at least one phosphorothioate diester linkages; one or more phosphorothioate diester precursors are formed for each of the corresponding phosphorothioate diester linkage; and
   each phosphorothioate diester precursor is converted to a phosphorothioate diester linkage after the desired length is achieved.

[1173] In some embodiments, the present invention provides methods for making a chirally controlled oligonucleotide comprising steps of:
[1174] (1) coupling;
[1175] (2) capping;
[1176] (3) modifying;
[1177] (4) deblocking; and
[1178] (5) repeating steps (1)-(4) until a desired length is achieved;
   wherein:
   the chirally controlled oligonucleotide comprises at least one phosphorothioate diester linkages and at least one phosphate diester internucleotidic linkage;
   at least one modifying step is replaced by an oxidization step; and
   at least one modifying step is performed to install a phosphorothioate diester precursor for each of the phosphorothioate diester linkages; and
   each phosphorothioate diester precursor is converted to a phosphorothioate diester linkage after the desired length is achieved.

[1179] In some embodiments, the use of a phosphorothioate diester precursor increases the stability of oligonucleotide during synthesis. In some embodiments, the use of a phosphorothioate diester precursor improves the efficiency of chirally controlled oligonucleotide synthesis. In some embodiments, the use of a phosphorothioate diester precursor improves the yield of chirally controlled oligonucleotide synthesis. In some embodiments, the use of a phosphorothioate diester precursor improves the product purity of chirally controlled oligonucleotide synthesis.

[1180] In some embodiments, the phosphorothioate diester precursor in the above-mentioned methods is

[chemical structure]

In some embodiments,

[chemical structure]

is converted to a phosphorothioate diester linkage during deprotection/release. An exemplary cycle is depicted in Scheme I-d. More examples are depicted below.

[chemical structure]

[chemical structure]

[1181] As illustrated in Scheme I-d, both phosphorothioate and phosphate diester linkages can be incorporated into the same chirally controlled oligonucleotide. As understood by a person of ordinary skill in the art, the provided methods do not require that the phosphorothioate diester and the phosphate diester to be consecutive-other internucleotidic linkages can form between them using a cycle as described above. In Scheme I-d, phosphorothioate diester precursors,

[chemical structure]

are installed in place of the phosphorothioate diester linkages. In some embodiments, such replacement provided increased synthesis efficiency during certain steps, for instance, the oxidation step. In some embodiments, the use of phosphorothioate diester precursors generally improve the stability of chirally controlled oligonucleotides during synthesis and/or storage. After cycle exit, during deprotection/release, the phosphorothioate diester precursor is converted to phosphorothioate diester linkage. In some embodiments, it is beneficial to use phosphorothioate diester precursor even when no phosphate diester linkage is present in the chirally controlled oligonucleotide, or no oxidation step is required during synthesis.

[1182] As in Scheme I-c, in some embodiments, non-chirally pure phosphoramidite can be used for cycles comprising oxidation steps. In some embodiments, p-cyanoethylphosphoramidites protected with DMTr is used. In some embodiments, the phosphoramidite being used has the structure of

[chemical structure]

[1183] In some embodiments, methods of the present invention provide chirally controlled oligonucleotide compositions that are enriched in a particular oligonucleotide type.

[1184] In some embodiments, at least about 10% of a provided crude composition is of a particular oligonucleotide type. In some embodiments, at least about 20% of a provided crude composition is of a particular oligonucleotide type. In some embodiments, at least about 30% of a provided crude composition is of a particular oligonucleotide type. In some embodiments, at least about 40% of a provided crude composition is of a particular oligonucleotide type. In some embodiments, at least about 50% of a provided crude composition is of a particular oligonucleotide type. In some embodiments, at least about 60% of a provided crude composition is of a particular oligonucleotide type. In some embodiments, at least about 70% of a provided crude composition is of a particular oligonucleotide type. In some embodiments, at least about 80% of a provided crude composition is of a particular oligonucleotide type. In some embodiments, at least about 90% of a provided crude composition is of a particular oligonucleotide type. In some embodiments, at least about 95% of a provided crude composition is of a particular oligonucleotide type.

[1185] In some embodiments, at least about 1% of a provided composition is of a particular oligonucleotide type. In some embodiments, at least about 2% of a provided composition is of a particular oligonucleotide type. In some embodiments, at least about 3% of a provided composition is of a particular oligonucleotide type. In some embodiments, at least about 4% of a provided composition is of a particular oligonucleotide type. In some embodiments, at least about 5% of a provided composition is of a particular oligonucleotide type. In some embodiments, at least about 10% of a provided composition is of a particular oligonucleotide type. In some embodiments, at least about 20% of a provided composition is of a particular oligonucleotide type. In some embodiments, at least about 30% of a provided composition is of a particular oligonucleotide type. In some embodiments, at least about 40% of a provided composition is of a particular oligonucleotide type. In some embodiments, at least about 50% of a provided composition is of a particular oligonucleotide type. In some embodiments, at least about 60% of a provided composition is of a particular oligonucleotide type. In some embodiments, at least about 70% of a provided composition is of a particular oligonucleotide type. In some embodiments, at least about 80% of a provided composition is of a particular oligonucleotide type. In some embodiments, at least about 90% of a provided composition is of a particular oligonucleotide type. In some embodiments, at least about 95% of a provided composition is of a particular oligonucleotide type.

### Biological Applications

[1186] As discussed in detail herein, the present invention provides, among other things, a chirally controlled oligonucleotide composition, meaning that the composition contains a plurality of oligonucleotides of at least one type. Each oligonucleotide molecule of a particular “type” is comprised of preselected (e.g., predetermined) structural elements with respect to: (1) base sequence; (2) pattern of backbone linkages; (3) pattern of backbone chiral centers; and (4) pattern of backbone P-modification moieties. In some embodiments, provided oligonucleotide compositions contain oligonucleotides that are prepared in a single synthesis process. In some embodiments, provided compositions contain oligonucleotides having more than one chiral configuration within a single oligonucleotide molecule (e.g., where different residues along the oligonucleotide have different stereochemistry); in some such embodiments, such oligonucleotides may be obtained in a single synthesis process, without the need for secondary conjugation steps to generate individual oligonucleotide molecules with more than one chiral configuration.

[1187] Oligonucleotide compositions as provided herein can be used as agents for modulating a number of cellular processes and machineries, including but not limited to, transcription, translation, immune responses, epigenetics, etc. In addition, oligonucleotide compositions as provided herein can be used as reagents for research and/or diagnostic purposes. One of ordinary skill in the art will readily recognize that the present invention disclosure herein is not limited to particular use but is applicable to any situations where the use of synthetic oligonucleotides is desirable. Among other things, provided compositions are useful in a variety of therapeutic, diagnostic, agricultural, and/or research applications.

[1188] In some embodiments, provided oligonucleotide compositions comprise oligonucleotides and/or residues thereof that include one or more structural modifications as described in detail herein. In some embodiments, provided oligonucleotide compositions comprise oligonucleoties that contain one or more nucleic acid analogs. In some embodiments, provided oligonucleotide compositions comprise oligonucleotides that contain one or more artificial nucleic acids or residues, including but not limited to: peptide nucleic acids (PNA), Morpholino and locked nucleic acids (LNA), glycon nucleic acids (GNA), threose nucleic acids (TNA), Xeno nucleic acids (ZNA), and any combination thereof.

[1189] In any of the embodiments, the invention is useful for oligonucleotide-based modulation of gene expression, immune response, etc. Accordingly, stereo-defined, oligonucleotide compositions of the invention, which contain oligonucleotides of predetermined type (i.e., which are chirally controlled, and optionally chirally pure), can be used in lieu of conventional stereo-random or chirally impure counterparts. In some embodiments, provided compositions show enhanced intended effects and/or reduced unwanted side effects. Certain embodiments of biological and clinical/therapeutic applications of the invention are discussed explicitly below.

[1190] Various dosing regimens can be utilized to administer, provided chirally controlled oligonucleotide compositions. In some embodiments, multiple unit doses are administered, separated by periods of time. In some embodiments, a given composition has a recommended dosing regimen, which may involve one or more doses. In some embodiments, a dosing regimen comprises a plurality of doses each of which are separated from one another by a time period of the same length; in some embodiments, a dosing regimen comprises a plurality of doses and at least two different time periods separating individual doses. In some embodiments, all doses within a dosing regimen are of the same unit dose amount. In some embodiments, different doses within a dosing regimen are of different amounts. In some embodiments, a dosing regimen comprises a first dose in a first dose amount, followed by one or more additional doses in a second dose amount different from the first dose amount. In some embodiments, a dosing regimen comprises a first dose in a first dose amount, followed by one or more additional doses in a second (or subsequent) dose amount that is same as or different from the first dose (or another prior dose) amount. In some embodiments, a dosing regimen comprises administering at least one unit dose for at least one day. In some embodiments, a dosing regimen comprises administering more than one dose over a time period of at least one day, and sometimes more than one day. In some embodiments, a dosing regimen comprises administering multiple doses over a time period of at least week. In some embodiments, the time period is at least 2, 3, 4, 5, 6, 7, 8, 9, 10, 11, 12, 13, 14, 15, 16, 17, 18, 19, 20, 21, 22, 23 24, 25, 26, 27, 28, 29, 30, 31, 32, 33, 34, 35, 36, 37, 38, 39, 40 or more (e.g., about 45, 50, 55, 60, 65, 70, 75, 80, 85, 90, 95, 100 or more) weeks. In some embodiments, a dosing regimen comprises administering one dose per week for more than one week. In some embodiments, a dosing regimen comprises administering one dose per week for 2, 3, 4, 5, 6, 7, 8, 9, 10, 11, 12, 13, 14, 15, 16, 17, 18, 19, 20, 21, 22, 2324, 25, 26, 27, 28, 29, 30, 31, 32, 33, 34, 35, 36, 37, 38, 39, 40 or more (e.g., about 45, 50, 55, 60, 65, 70, 75, 80, 85, 90, 95, 100 or more) weeks. In some embodiments, a dosing regimen comprises administering one dose every two weeks for more than two week period. In some embodiments, a dosing regimen comprises administering one dose every two weeks over a time period of 2, 3, 4, 5, 6, 7, 8, 9, 10, 11, 12, 13, 14, 15, 16, 17, 18, 19, 20, 21, 22, 23 24, 25, 26, 27, 28, 29, 30, 31, 32, 33, 34, 35, 36, 37, 38, 39, 40 or more (e.g., about 45, 50, 55, 60, 65, 70, 75, 80, 85, 90, 95, 100 or more) weeks. In some embodiments, a dosing regimen comprises administering one dose per month for one month. In some embodiments, a dosing regimen comprises administering one dose per month for more than one month. In some embodiments, a dosing regimen comprises administering one dose per month for 2, 3, 4, 5, 6, 7, 8, 9, 10, 11, 12, or more months. In some embodiments, a dosing regimen comprises administering one dose per week for about 10 weeks. In some embodiments, a dosing regimen comprises administering one dose per week for about 20 weeks. In some embodiments, a dosing regimen comprises administering one dose per week for about 30 weeks. In some embodiments, a dosing regimen comprises administering one dose per week for 26 weeks. In some embodiments, a chirally controlled oligonucleotide composition is administered according to a dosing regimen that differs from that utilized for a chirally uncontrolled (e.g., stereorandom) oligonucleotide composition of the same sequence, and/or of a different chirally controlled oligonucleotide composition of the same sequence. In some embodiments, a chirally controlled oligonucleotide composition is administered according to a dosing regimen that is reduced as compared with that of a chirally uncontrolled (e.g., stereorandom) oligonucleotide composition of the same sequence in that it achieves a lower level of total exposure over a given unit of time, involves one or more lower unit doses, and/or includes a smaller number of doses over a given unit of time. In some embodiments, a chirally controlled oligonucleotide composition is administered according to a dosing regimen that extends for a longer period of time than does that of a chirally uncontrolled (e.g., stereorandom) oligonucleotide composition of the same sequence Without wishing to be limited by theory, Applicant notes that in some embodiments, the shorter dosing regimen, and/or longer time periods between doses, may be due to the improved stability, bioavailability, and/or efficacy of a chirally controlled oligonucleotide composition. In some embodiments, a chirally controlled oligonucleotide composition has a longer dosing regimen compared to the corresponding chirally uncontrolled oligonucleotide composition. In some embodiments, a chirally controlled oligonucleotide composition has a shorter time period between at least two doses compared to the corresponding chirally uncontrolled oligonucleotide composition. Without wishing to be limited by theory, Applicant notes that in some embodiments longer dosing regimen, and/or shorter time periods between doses, may be due to the improved safety of a chirally controlled oligonucleotide composition.

[1191] A single dose can contain various amounts of a type of chirally controlled oligonucleotide, as desired suitable by the application. In some embodiments, a single dose contains about 1, 5, 10, 20, 30, 40, 50, 60, 70, 80, 90, 100, 110, 120, 130, 140, 150, 160, 170, 180, 190, 200, 210, 220, 230, 240, 250, 260, 270, 280, 290, 300 or more (e.g., about 350, 400, 450, 500, 550, 600, 650, 700, 750, 800, 850, 900, 950, 1000 or more) mg of a type of chirally controlled oligonucleotide. In some embodiments, a single dose contains about 1 mg of a type of chirally controlled oligonucleotide. In some embodiments, a single dose contains about 5 mg of a type of chirally controlled oligonucleotide. In some embodiments, a single dose contains about 10 mg of a type of chirally controlled oligonucleotide. In some embodiments, a single dose contains about 15 mg of a type of chirally controlled oligonucleotide. In some embodiments, a single dose contains about 20 mg of a type of chirally controlled oligonucleotide. In some embodiments, a single dose contains about 50 mg of a type of chirally controlled oligonucleotide. In some embodiments, a single dose contains about 100 mg of a type of chirally controlled oligonucleotide. In some embodiments, a single dose contains about 150 mg of a type of chirally controlled oligonucleotide. In some embodiments, a single dose contains about 200 mg of a type of chirally controlled oligonucleotide. In some embodiments, a single dose contains about 250 mg of a type of chirally controlled oligonucleotide. In some embodiments, a single dose contains about 300 mg of a type of chirally controlled oligonucleotide. In some embodiments, a chirally controlled oligonucleotide is administered at a lower amount in a single dose, and/or in total dose, than a chirally uncontrolled oligonucleotide. In some embodiments, a chirally controlled oligonucleotide is administered at a lower amount in a single dose, and/or in total dose, than a chirally uncontrolled oligonucleotide due to improved efficacy. In some embodiments, a chirally controlled oligonucleotide is administered at a higher amount in a single dose, and/or in total dose, than a chirally uncontrolled oligonucleotide. In some embodiments, a chirally controlled oligonucleotide is administered at a higher amount in a single dose, and/or in total dose, than a chirally uncontrolled oligonucleotide due to improved safety.

### Biologically Active Oligonucleotides

[1192] A provided oligonucleotide composition as used herein may comprise single stranded and/or multiply stranded oligonucleotides. In some embodiments, single-stranded oligonucleotides contain self-complementary portions that may hybridize under relevant conditions so that, as used, even single-stranded oligonucleotides may have at least partially double-stranded character. In some embodiments, an oligonucleotide included in a provided composition is single-stranded, double-stranded, or triple-stranded. In some embodiments, an oligonucleotide included in a provided composition comprises a single-stranded portion and a multiple-stranded portion within the oligonucleotide. In some embodiments, as noted above, individual single-stranded oligonucleotides can have double-stranded regions and single-stranded regions.

[1193] In some embodiments, provided compositions include one or more oligonucleotides fully or partially complementary to strand of: structural genes, genes control and/or termination regions, and/or self-replicating systems such as viral or plasmid DNA. In some embodiments, provided compositions include one or more oligonucleotides that are or act as siRNAs or other RNA interference reagents (RNAi agents or iRNA agents), shRNA, antisense oligonucleotides, self-cleaving RNAs, ribozymes, fragment thereof and/or variants thereof (such as Peptidyl transferase 23S rRNA, RNase P, Group I and Group II introns, GIR1 branching ribozymes, Leadzyme, Hairpin ribozymes, Hammerhead ribozymes, HDV ribozymes, Mammalian CPEB3 ribozyme, VS ribozymes, glmS ribozymes, CoTC ribozyme, etc.), microRNAs, microRNA mimics, supermirs, aptamers, antimirs, antagomirs, Ul adaptors, triplex-forming oligonucleotides, RNA activators, long non-coding RNAs, short non-coding RNAs (e.g., piRNAs), immunomodulatory oligonucleotides (such as immunostimulatory oligonucleotides, immunoinhibitory oligonucleotides), GNA, LNA, ENA, PNA, TNA, morpholinos, G-quadruplex (RNA and DNA), antiviral oligonucleotides, and decoy oligonucleotides.

[1194] In some embodiments, provided compositions include one or more hybrid (e.g., chimeric) oligonucleotides. In the context of the present disclosure, the term “hybrid” broadly refers to mixed structural components of oligonucleotides. Hybrid oligonucleotides may refer to, for example, (1) an oligonucleotide molecule having mixed classes of nucleotides, e.g., part DNA and part RNA within the single molecule (e.g., DNA-RNA); (2) complementary pairs of nucleic acids of different classes, such that DNA:RNA base pairing occurs either intramolecularly or intermolecularly; or both; (3) an oligonucleotide with two or more kinds of the backbone or internucleotide linkages.

[1195] In some embodiments, provided compositions include one or more oligonucleotide that comprises more than one classes of nucleic acid residues within a single molecule. For example, in any of the embodiments described herein, an oligonucleotide may comprise a DNA portion and an RNA portion. In some embodiments, an oligonucleotide may comprise a unmodified portion and modified portion.

[1196] Provided oligonucleotide compositions can include oligonucleotides containing any of a variety of modifications, for example as described herein. In some embodiments, particular modifications are selected, for example, in light of intended use. In some embodiments, it is desirable to modify one or both strands of a double-stranded oligonucleotide (or a double-stranded portion of a single-stranded oligonucleotide). In some embodiments, the two strands (or portions) include different modifications. In some embodiments, the two strands include the same modifications. One of skill in the art will appreciate that the degree and type of modifications enabled by methods of the present invention allow for numerous permutations of modifications to be made. Exemplary such modifications are described herein and are not meant to be limiting.

### RNA Interference

[1197] Provided oligonucleotide compositions are useful, among other things, for applications in RNA interference.

[1198] RNA interference (RNAi) refers to the inhibition of gene expression by RNA molecules. Typically, these are small, double-stranded RNA molecules. Since gene expression controls most cellular processes, the ability to inhibit gene expression provides a potentially powerful tool for modulating biological conditions, including treating human and/or animal (e.g., livestock or pet) diseases. A number of studies have been conducted to demonstrate the use of RNAi in regulating or controlling disease-associated gene expression. See, for example: Cullen, K. A., Hall, M. J. & Golosinskiy, A. Ambulatory surgery in the United States, 2006. Natl Health Stat Report 2009; 1-25; Elbashir S, Harborth J, Lendeckel W, Yalcin A, Weber K, Tuschl T. Duplexes of 21-nucleotide RNAs mediate RNA interference in cultured mammalian cells. Nature 2001; 411: 494-498; Fire A, Xu S, Montgomery M K, Kostas S A, Driveri S E & Mello C. Potent and specific RNA interference by double-stranded RNA in Caenorhadbditis elegans. Nature 1998; 391 (6669):806-811; Gauglitz, G. G., Kortin, H. C., Pavicic, T., Ruzicka, T., & Jeschke, M. G. Hypertrophic scarring and keloids: pathomechanisms and current emerging treatment strategies. Mol Med 2011; 17 (1-2): 113-125; Li-Tsang, C. W., Lau, J. C. & Chan, C. C. Prevalence of hypertrophic scar formation and its characteristics among the Chinese population. Burns 2005; 31, 610-616; Wang H, Ghosh A, Baigude H, Yang C, Qui L, Xia L, et al. Therapeutic gene silencing delivered by a chemically modified siRNA against mutant SOD1 slows ALS progression. JBC 2008; 283 (23):15845-15852; Weiser, T. G., Regenbogen, S. E., Thompson, K. D., Haynes, A. B., Lipsitz, S. R., Berry, W. R. & Gawande, A. A. An estimation of the global volume of surgery: a modeling strategy based on available data. Lancet 2008; 372(9633):139-44.

[1199] The phenomenon of RNA interference was initially demonstrated in C. elegans, in which the injection of dsRNA molecules inhibited complementary gene expression. Though the use of siRNA has become a widely used tool for down-regulating gene expression, the existence of a naturally occurring pathway in eukaryotes has been well described. The origin of endogenous siRNA (or miRNA) may be transposons, viruses, repetitive sequences and genes. The process of producing effective endogenous siRNA is regulated by three enzymes. RNA-dependent RNA polymerases convert single-stranded RNA into double-stranded RNA. Alternatively, DNA-dependent RNA polymerases produce dsRNA by transcribing inverted DNA repeats. The resulting large RNA molecules are subject to digestion by ribonuclease III (Dicer) to produce short double-stranded siRNA molecules. Argonaute proteins are then required to bind siRNA molecules to form a complex known as RISC (RNA-induced silencing complex). RISC recognizes double-stranded RNA fragment and splits the double-strands apart, retaining one strand in the RISC complex. RISCs may then promote epigentic silencing through RNA-directed DNA methylation or by target RNA cleavage. Though protein translation may be knocked down considerably, siRNA does not normally eliminate the expression of a gene target completely. RISC can therefore help the guide strand of RNA bind to and destroy its corresponding cellular messenger RNA target. Thus, RNAi provides a method to potentially block the creation of the proteins that cause disease.

[1200] siRNA technology represents a useful molecular tool. The use of RNA interference for artificially manipulating gene expression was initially limited by the activation of cellular antiviral mechanisms. Exposure of cells to sequences longer than 30 nucleotides has been shown to induce interferon gene expression resulting in non-specific RNA degradation and reduced protein synthesis. However, this problem can be circumvented by designing short (e.g., 19 to 22 nucleotide) siRNA sequences. Methods for siRNA delivery into cells include, without limitation, liposome-based addition of purified ribonucleotides to the media or transfection of plasmid vectors designed to express siRNA molecules. Plasmid vectors rely on the use of two RNA Polymerase III promoters (U6 and H1) to drive transcription of the siRNA molecule. The target sequence (19 to 29 nucleotides) is placed in a sense and antisense orientation with a small spacer group in between (short hairpin RNA or shRNA). Once transcribed, a hairpin structure is formed that can be recognized and cleaved by Dicer. Alternatively, RNA duplexes may be transcribed without hairpin structures and directly process by the RISC. Currently, there are a variety of plasmid and viral vectors that utilize similar concepts to produce siRNA, shRNA, or single stranded siRNA (ss-siRNA) molecules (See, e.g., 2012 Cell-150-883 Walt Lima et al. ssRNAi activate RNAi in animals).

[1201] In some embodiments, a provided oligonucleotide or oligonucleotide composition is useful as ss-siRNA or GalNAc conjugated siRNA.

[1202] The art is familiar with certain structural features that affect siRNA as a tool. Following the discovery of siRNA, several studies attempted to identify the optimal characteristics required for siRNA design. Some of the requirements include using sequences shorter than 30 nucleotides to avoid PKR activation, sequence stability at the 5′ end of the antisense strand relative to the 3′ terminus and inserting a TT overhang. Based on studies like these, a number of algorithms have been developed by academic and industrial labs to predict the most effective target sequences for a given gene. Though most of these programs are not perfect, the likelihood of obtaining a predicted sequence is superior to designing sequences without consideration of the recommended features. Synthesis and testing of multiple sequences may be required. The design of siRNA experiments may contain some potential pitfalls, thus the design should be done to include appropriate controls and measurable endpoints. A negative control may include a noncomplementary sequence with thermodynamically similar properties as the effective siRNA sequence. When transfecting a plasmid vector to introduce siRNA or shRNA, the ratio of lipid to nucleic acid may be equal and the control vector may contain a sequence that is transcribed and processed intracellularly. Validation of the siRNA effect may also be carried out by measuring both RNA and protein expression.

[1203] In some embodiments, a provided oligonucleotide as used herein is double-stranded. Typically, double-stranded oligonucleotides comprising a duplex structure of between 20 and 23, but specifically 21, base pairs have been hailed as particularly effective in inducing RNA interference (Elbashir et al., EMBO 2001, 20:6877-6888). However, others have found that shorter or longer double-stranded oligonucleotides can be effective as well.

[1204] In some embodiments, a double-stranded oligonucleotide utilized in accordance with the present invention comprises two oligonucleotide strands that are sufficiently complementary to hybridize to form a duplex structure. In some embodiments, a duplex structure is between about 12 to about 45 base pairs in length. In some embodiments, a duplex structure is between about 18 to about 25 base pairs in length. In some embodiments, a duplex structure is between about 19 to about 24 base pairs in length. In some embodiments, a duplex structure is between about 19 to about 21 base pairs in length. In some embodiments, a duplex structure is a double-stranded oligonucleotides of between about 25 to about 30 base pairs in length. In some embodiments, a duplex structure is a double-stranded oligonucleotide of between about 10 to about 15 base pairs in length. In some embodiments, a double-stranded oligonucleotide is at least about 21 nucleotides long.

[1205] In some embodiments, a double-stranded oligonucleotide utilized in accordance with the present invention comprises a sense strand and an antisense strand, wherein the antisense RNA strand has a region of complementarity which is complementary to at least a part of a target sequence, and the duplex region is about 14 to about 30 nucleotides in length. In some embodiments, a region of complementarity to the target sequence is between about 14 to about 30 nucleotides in length. In some embodiments, a region of complementarity to the target sequence is between about 18 to about 25 nucleotides in length. In some embodiments, a region of complementarity to the target sequence is between about 19 to about 24 nucleotides in length. In some embodiments, a region of complementarity to the target sequence is about 19 to about 21 nucleotides in length.

[1206] The phrase “antisense strand” as used herein, refers to an oligonucleotide that is substantially or 100% complementary to a target sequence of interest. The phrase “antisense strand” includes the antisense region of both oligonucleotides that are formed from two separate strands, as well as unimolecular oligonucleotides that are capable of forming hairpin or dumbbell type structures. The terms “antisense strand” and “guide strand” are used interchangeably herein.

[1207] The phrase “sense strand” refers to an oligonucleotide that has the same nucleoside sequence, in whole or in part, as a target sequence such as a messenger RNA or a sequence of DNA. The terms “sense strand” and “passenger strand” are used interchangeably herein.

[1208] By “target sequence” is meant any nucleic acid sequence whose expression or activity is to be modulated. The target nucleic acid can be DNA or RNA, such as endogenous DNA or RNA, viral DNA or viral RNA, or other RNA encoded by a gene, virus, bacteria, fungus, mammal, or plant. In some embodiments, a target sequence is associated with a disease or disorder.

[1209] By “specifically hybridizable” and “complementary” is meant that a nucleic acid can form hydrogen bond(s) with another nucleic acid sequence by either traditional Watson-Crick or other non-traditional types. In reference to the nucleic molecules of the present invention, the binding free energy for a nucleic acid molecule with its complementary sequence is sufficient to allow the relevant function of the nucleic acid to proceed, e.g., RNAi activity. Determination of binding free energies for nucleic acid molecules is well known in the art (see, e.g., Turner et al, 1987, CSH Symp. Quant. Biol. LIT pp. 123-133; Frier et al., 1986, Proc. Nat. Acad. Sci. USA 83:9373-9377; Turner et al., 1987, /. Ain. Chem. Soc. 109:3783-3785)

[1210] A percent complementarity indicates the percentage of contiguous residues in a nucleic acid molecule that can form hydrogen bonds (e.g., Watson-Crick base pairing) with a second nucleic acid sequence (e.g., 5, 6, 7, 8, 9, 10 out of 10 being 50%, 60%, 70%, 80%, 90%, and 100% complementary). “Perfectly complementary” or 100% complementarity means that all the contiguous residues of a nucleic acid sequence will hydrogen bond with the same number of contiguous residues in a second nucleic acid sequence. Less than perfect complementarity refers to the situation in which some, but not all, nucleoside units of two strands can hydrogen bond with each other. “Substantial complementarity” refers to polynucleotide strands exhibiting 90% or greater complementarity, excluding regions of the polynucleotide strands, such as overhangs, that are selected so as to be noncomplementary. Specific binding requires a sufficient degree of complementarity to avoid non-specific binding of the oligomeric compound to non-target sequences under conditions in which specific binding is desired, e.g., under physiological conditions in the case of in vivo assays or therapeutic treatment, or in the case of in vitro assays, under conditions in which the assays are performed. In some embodiments, non-target sequences differ from corresponding target sequences by at least 5 nucleotides.

### Double Stranded Oligonucleotides

[1211] In some embodiments, a double-stranded oligonucleotide utilized in accordance with the present invention is sufficiently large that it can be cleaved by an endogenous molecule, e.g., by Dicer, to produce smaller double-stranded oligonucleotides, e.g., RNAi agents. In some embodiments, a provided double-stranded oligonucleotide modulates the expression of a target gene via RISC mediated cleavage of the target sequence.

[1212] In some embodiments, a double-stranded region of a double-stranded oligonucleotide is equal to or at least, 10, 11, 12, 13, 14, 15, 16, 17, 18, 19, 20, 21, 22, 23, 23, 24, 25, 26, 27, 28, 29, or 30 nucleotide pairs in length.

[1213] In some embodiments, an antisense strand of a double-stranded oligonucleotide is equal to or at least 14, 15, 16, 17, 18, 19, 20, 21, 22, 23, 23, 24, 25, 26, 27, 28, 29, or 30 nucleotides in length.

[1214] In some embodiments, a sense strand of a double-stranded oligonucleotide is equal to or at least 10, 11, 12, 13, 14, 15, 16, 17, 18, 19, 20, 21, 22, 23, 23, 24, 25, 26, 27, 28, 29, or 30 nucleotides in length.

[1215] In some embodiments, one strand has at least one stretch of 1-5 single-stranded nucleotides in the double-stranded region. By “stretch of single-stranded nucleotides in the double-stranded region” is meant that there is present at least one nucleotide base pair at both ends of the single-stranded stretch. In some embodiments, both strands have at least one stretch of 1-5 (e.g., 1, 2, 3, 4, or 5) single-stranded nucleotides in the double stranded region. When both strands have a stretch of 1-5 (e.g., 1, 2, 3, 4, or 5) single-stranded nucleotides in the double stranded region, such single-stranded nucleotides can be opposite to each other (e.g., a stretch of mismatches) or they can be located such that the second strand has no single-stranded nucleotides opposite to the single-stranded oligonucleotides of the first strand and vice versa (e.g., a single-stranded loop). In some embodiments, the single-stranded nucleotides are present within 8 nucleotides from either end, for example 8, 7, 6, 5, 4, 3, or 2 nucleotide from either the 5′ or 3′ end of the region of complementarity between the two strands.

[1216] In some embodiments, each strand of a double-stranded oligonucleotide utilized in accordance with the present invention has a ZXY structure, such as is described in International Application No. PCT/US2004/07070 filed on Mar. 8, 2004, contents of which are hereby incorporated in their entireties.

### Hairpins and Dumbbells

[1217] In some embodiments, a double-stranded oligonucleotide utilized in accordance with the present invention is a single molecule that comprises self-complementary regions; thus the two “strands” of a double-stranded regions are in fact covalently linked to one another. Such two strands can be linked to each other at both ends, or at one end only. By linking at one end is meant that 5′-end of first strand is linked to the 3′-end of the second strand or 3′-end of first strand is linked to 5′-end of the second strand. When the two strands are linked to each other at both ends, 5′-end of first strand is linked to 3′-end of second strand and 3′-end of first strand is linked to 5′-end of second strand. In some embodiments, two strands are linked together by an oligonucleotide linker including, but not limited to, (N)ₙ; wherein N is independently a modified or unmodified nucleotide and n is 3-23. In some embodiments, n is 3-10, e.g., 3, 4, 5, 6, 7, 8, 9, or 10. In some embodiments, an oligonucleotide linker is selected from the group consisting of GNRA, (G)₄, (U)₄, and (dT)₄, wherein N is a modified or unmodified nucleotide and R is a modified or unmodified purine nucleotide. In some embodiments, some of the nucleotides in the linker are involved in base-pair interactions with other nucleotides in the linker. In some embodiments, the two strands are linked together by a non-nucleosidic linker, e.g.

[1218] In some embodiments, hairpin and dumbbell type RNAi agents have a duplex region equal to or at least 14, 15, 15, 16, 17, 18, 19, 29, 21, 22, 23, 24, or 25 nucleotide pairs. In some embodiments, the duplex region is equal to or fewer than 200, 100, or 50, nucleotide pairs in length. In some embodiments, ranges for the duplex region are about 15 to about 30, about 17 to about 23, about 19 to about 23, and about 19 to about 21 nucleotides pairs in length. In some embodiments, hairpin oligonucleotides mimic the natural precursors of microRNAs.

[1219] In some embodiments, hairpin RNAi agents can have a single strand overhang or terminal unpaired region, e.g., at the 3′ end on the antisense side of the hairpin, etc. In some embodiments, the overhangs are about 1 to about 4 nucleotides in length. In some embodiments, the overhangs are about 2 to about 3 nucleotides in length.

[1220] In some embodiments, a hairpin RNAi agent is characterized in that the 3′-end of an antisense strand is linked to 5′-end of a sense strand. In some embodiments, a hairpin RNAi agent is characterized in that the 5′-end of an antisense strand is linked to the 3′-end of a sense strand. Provided hairpin oligonucleotides are also referred to herein as “shRNA”.

### Single-Stranded Oligonucleotides

[1221] In some embodiments, a single-stranded oligonucleotide utilized in accordance with the present invention comprises a nucleotide sequence that is substantially complementary to a “sense” nucleic acid encoding a gene expression product, e.g., complementary to the coding strand of a double-stranded cDNA molecule or complementary to an RNA sequence, e.g., a pre-mRNA, mRNA, miRNA, or premiRNA. Provided single-stranded oligonucleotides include, but are not limited to, antisense oligonucleotides and single-stranded RNAi agents. In some embodiments, the region of complementarity is less than about 30 nucleotides in length. In some embodiments, the region of complementarity is at least about 15 nucleotides in length. In some embodiments, a provided single stranded oligonucleotide is about 10 to about 25 nucleotides in length (e.g., about 11, 12, 13, 14, 15, 16, 18, 19, 20, 21, 22, 23, or 24 nucleotides in length). In some embodiments, a provided single stranded oligonucleotide is about 25 to about 30 nucleotides in length. In some embodiments, a provided single stranded oligonucleotide is about 15 to about 29 nucleotides in length. In some embodiments, a provided single stranded oligonucleotide is characterized as having less than 100% complementarity to a mRNA, RNA or DNA arc. In some embodiments, a provided single-stranded oligonucleotide has a ZXY structure, such as is described in International Application No. PCT/US2004/07070 filed on Mar. 8, 2004.

[1222] In some embodiments, a utilized single-stranded oligonucleotide can hybridize to a complementary RNA, e.g., mRNA, pre-mRNA, and prevent access of the translation machinery to the target RNA transcript, thereby preventing protein synthesis. In some embodiments, a provided single-stranded oligonucleotide can hybridize to a complementary RNA and the RNA target can be subsequently cleaved by an enzyme such as RNasc H, thus preventing translation of target RNA. In some embodiments, a provided single-stranded oligonucleotide modulates the expression of a target gene via RISC mediated cleavage of the target sequence.

[1223] A “single-stranded RNAi agent” as used herein, is an RNAi agent which is made up of a single molecule. In some embodiments, a single-stranded RNAi agent includes a duplexed region, formed by intra-strand pairing, e.g., it is or it includes a hairpin or pan-handle structure. In some embodiments, single-stranded RNAi agents are antisense with regard to the target molecule. In some embodiments, single-stranded RNAi agents are sufficiently long such that they are able to enter the RISC and participate in RISC mediated cleavage of a target mRNA. Exemplary single-stranded siRNAs (ss siRNAs) are known and are described, for example, in U.S. Pat. Pub. No. 2006/0166901, the contents of which are herein incorporated by reference in its entirety.

[1224] In some embodiments, a single-stranded RNAi agent is at least about 12 nucleotides in length. In some embodiments, a single-stranded RNAi agent is at least about 15 nucleotides in length. In some embodiments, a single-stranded RNAi agent is at least about 20 nucleotides in length. In some embodiments, a single-stranded RNAi agent is at least about 25 nucleotides in length. In some embodiments, a single-stranded RNAi agent is at least about 29 nucleotides in length. In some embodiments, a single-stranded RNAi agent is at least about 30 nucleotides in length. In some embodiments, a single-stranded RNAi agent is at least about 35 nucleotides in length. In some embodiments, a single-stranded RNAi agent is at least about 40 nucleotides in length. In some embodiments, a single-stranded RNAi agent is at least about 50 nucleotides in length.

[1225] In some embodiments, a single-stranded RNAi agent is less than 200 nucleotides in length. In some embodiments, a single-stranded RNAi agent is less than 100 nucleotides in length. In some embodiments, a single-stranded RNAi agent is less than 60 nucleotides in length.

[1226] In some embodiments. a single-stranded RNAi agent is 5′ phosphorylated. In some embodiments, a single stranded RNAi agent includes a phosphoryl analog at the 5′ prime terminus. In certain embodiments, a single-stranded RNAi agent has length from about 15 to about 29 nucleotides in length.

[1227] Single-stranded oligonucleotides, including those described and/or identified as single stranded siRNAs, microRNAs or mirs which may be used as targets or may serve as a template for the design of oligonucleotides of the invention are taught in, for example, Esau, et al. US Publication #20050261218 (U.S. Ser. No. 10/909,125) entitled “Oligonucleotides and compositions for use in modulation small non-coding RNAs” the entire contents of which are incorporated herein by reference.

[1228] The present invention encompasses research and/or diagnostic reagents that comprise single-stranded oligonucleotides. In some embodiments, a single-stranded oligonucleotide utilized in accordance with the present invention is and/or acts as a primer. In some embodiments, primers are used in polymerase-based chain reactions (i.e., PCR) to amplify nucleic acids. These applications include any known variations of PCR, such as reverse transcription PCR (RT-PCR) and real-time PCR.

### MicroRNAs

[1229] In some embodiments provided compositions comprise one or more oligonucleotides that are or act as MicroRNAs.

[1230] MicroRNAs (miRNAs or mirs) are a highly conserved class of small RNA molecules that are transcribed from DNA in the genomes of plants and animals, but are not translated into protein. Pre-microRNAs are processed into miRNAs. Processed microRNAs are single stranded 17-25 nucleotide (nt) RNA molecules that become incorporated into the RNA-induced silencing complex (RISC) and have been identified as key regulators of development, cell proliferation, apoptosis and differentiation. They are believed to play a role in regulation of gene expression by binding to the 3′-untranslated region of specific mRNAs. RISC mediates downregulation of gene expression through translational inhibition, transcript cleavage, or both. RISC is also implicated in transcriptional silencing in the nucleus of a wide range of eukaryotes.

[1231] MicroRNAs have also been implicated in modulation of pathogens in hosts. For example, see Jopling, C. L., et al., Science (2005) vol. 309, pp 1577-1581. Without wishing to be bound by theory, administration of a microRNA, microRNA mimic, and/or anti microRNA oligonucleotide, leads to modulation of pathogen viability, growth, development, and/or replication. In some embodiments, a provided oligonucleotide is a microRNA, microRNA mimic, and/or anti microRNA, wherein microRNA is a host microRNA. The number of miRNA sequences identified to date is large and growing, illustrative examples of which can be found, for example, in: “miRBase: microRIVA sequences, targets and gene nomenclature” Griffiths-Jones S, Grocock R J, van Dongen S, Bateman A, Enright A J. NAR, 2006, 34, Database Issue, D140-D144; “The microRNA Registry” Griffiths-Jones S. NAR, 2004, 32, Database Issue, D109-D 111. Non-limiting examples of useful miRNA sequences are also provided in the accompanying Appendix (C).

### Ribozymes

[1232] In some embodiments, provided compositions include one or more oligonucleotides that are or act as ribozymes.

[1233] Ribozymes are oligonucleotides having specific catalytic domains that possess endonuclease activity (Kim and Cech, Proc Natl Acad Sci USA. 1987 December; 84(24):8788-92; Forster and Symons, Cell. 1987 Apr. 24; 49(2):211-20). At least six basic varieties of naturally occurring enzymatic RNAs are known presently. In general, enzymatic nucleic acids act by first binding to a target RNA. Such binding occurs through the target binding portion of an enzymatic nucleic acid which is held in close proximity to an enzymatic portion of the molecule that acts to cleave the target RNA. Thus, the enzymatic nucleic acid first recognizes and then binds a target RNA through complementary base-pairing, and once bound to the correct site, acts enzymatically to cut the target RNA. Strategic cleavage of such a target RNA will destroy its ability to direct synthesis of an encoded protein. After an enzymatic nucleic acid has bound and cleaved its RNA target, it is released from that RNA to search for another target and can repeatedly bind and cleave new targets.

[1234] Methods of producing a ribozyme targeted to any target sequence are known in the art. Ribozymes can be designed as described in, inter alia, Int. Pat. Appl. Publ. No. WO 93/23569 and Int. Pat. Appl. Publ. No. WO 94/02595, each specifically incorporated herein by reference, and synthesized to be tested in vitro and in vivo, as described therein.

### Aptamers

[1235] In some embodiments, provided compositions include one or more oligonucleotides that are or act as aptamers.

[1236] Aptamers are nucleic acid or peptide molecules that bind to a particular molecule of interest with high affinity and specificity (Tuerk and Gold, Science 249:505 (1990); Ellington and Szostak, Nature 346:818 (1990)). DNA or RNA aptamers have been successfully produced which bind many different entities from large proteins to small organic molecules. See Eaton, Curr. Opin. Chem. Biol. 1:10-16 (1997), Famulok, Curr. Opin. Struct. Biol. 9:324-9 (1999), and Hermann and Patel, Science 287:820-5 (2000). Aptamers can be RNA or DNA based. Generally, aptamers are engineered through repeated rounds of in vitro selection or equivalently, SELEX (systematic evolution of ligands by exponential enrichment) to bind to various molecular targets such as small molecules, proteins, nucleic acids, and even cells, tissues and organisms. The SELEX procedure is a protocol in which single stranded oligonucleotides are selected from vast libraries of sequences, based on binding affinity at a target protein or other molecule (C. Tuerk, L. Gold, Science, 249 (1990), pp. 505-510; R. Green, A. D. Ellington, D. P. Bartel, J. W. Szostak, Methods Enzymol., 2 (1991), pp. 75-86; L. Gold, B. Polisky, O. Uhlenbeck, M. Yarus, Annu. Rev. Biochem., 64 (1995), pp. 763-797). The SELEX procedure is usually initiated with an RNA or DNA library consisting of some 10¹⁴-10¹⁵ random oligonucleotide sequences. In a fully randomised oligonucleotide library, each molecule will exhibit a unique tertiary structure which will be dependent on the nucleotide sequence of that molecule. The binding affinity of the oligonucleotide for the target protein will be determined by the fit between moieties on the surface of the oligonucleotide and epitopes on the target protein. As a consequence of starting from a library of vast diversity it is often possible to identify aptamers of nM or sub-nM affinity for the target protein and with selectivity for that target protein over other proteins with a high degree of structural homology (K. W. Uphoff, S. D. Bell, A. D. Ellington, Curr. Opin. Struct. Biol., 6 (1996), pp. 281-288). Using SELEX methodology RNA or DNA aptamers have been generated to many proteins, peptides and small molecules including dopamine (C. Mannironi, A. Di Nardo, P. Fruscoloni, G. P. Tocchini-Valentini, Biochemistry, 36 (1997), pp. 9726-9734), substance P (D. Nieuwlandt, M. Wecker, Biochemistry, 34 (1995), pp. 5651-5659), subtilisin (H. Takeno, S. Yamamoto, T. Tanaka, Y. Sakano, Y. Kikuchi, J. Biochem., 125 (1999), pp. 1115-1119), platelet derived growth factor (L. S. Green, D. Jellinek, R. Jenison, A. Ostman, C-H. Heldin, N. Janjic Biochemistry, 35 (1996), pp. 14413-14424), vascular endothelial growth factor (L. S. Green, D. Jellinek, C. Bell, L. A. Bebe, B. D. Feistner, S. C. Gill, F. M. Jucker, N. Janjic Chem. Biol., 2 (1995), pp. 683-695), thrombin (L. C. Bock, L. C. Griffen, J. A. Latham, E. H. Vermaas, J. J. Toole, Nature, 355 (1992), pp. 564-566), and L-selectin (D. O'Connell, A. Koenig, S. Jennings, B. Hicke, H. L. Han, T. Fitzwater, Y. F. Chang, N. Varki, D. Parma Proc. Natl. Acad. Sci. USA, 93 (1996), pp. 5883-5887).

[1237] As reviewed in Dua et al. (2008) Recent Patents on DNA & Gene Sequences, 2: 172-186 (incorporated herein by reference) in more detail, over the years, a number of modified SELEX protocols have been developed. Non-limiting examples of modified SELEX methods are described in the following publications: Counter SELEX (U.S. Pat. No. 5,580,737), Flow cell SELEX (WO9833941), Truncation SELEX (WO0056930), Blended SELEX (U.S. Pat. No. 5,683,867), Transcription free SELEX (US20026387620), Solution SELEX (U.S. Pat. No. 5,567,588), Chimeric SELEX (WO9604403), Tissue SELEX (US20026376474), Photo SELEX (U.S. Pat. No. 6,001,577), Toggle SELEX (US20077312325), Covalent SELEX/Chemi SELEX (U.S. Pat. No. 5,763,595), Genomic SELEX (US20016261774), SELEX without purified protein (WO0224954), CE-SELEX (WO03102212), Mirror-image SELEX—Spiegelmers (EP1386972) and Laser SELEX, DeSELEX (WO07035532), each of which is incorporated herein by reference in its entirety. Stereo-defined oligonucleotides embraced by the present invention may be used in any one or more of the variations of the SELEX methods.

[1238] An aptamer can be prepared by any known method, including synthetic, recombinant, and purification methods, and can be used alone or in combination with other aptamers specific for the same target. Further, as described more fully herein, the term “aptamer” specifically includes “secondary aptamers” containing a consensus sequence derived from comparing two or more known aptamers to a given target. Aptamers possess several characteristics that make them attractive therapeutic agents. Both DNA and RNA aptamers have been shown to bind their targets with dissociation constants (Kd) in the low picomolar to low nanomolar range. Binding of an aptamer is a highly specific interaction that can even discriminate between related proteins that share common structural domains. Though the binding affinity of both aptamers and antibodies is in the same range, aptamers have many additional features which overpower their rival in many cases. Unlike antibodies, aptamers can be targeted even against non immunogenic targets. During synthesis they can be easily subjected to a chemical modification that improves their stability and pharmacokinetics. They display nil to negligible levels of immunogenicity at therapeutic doses due to their resemblance to endogenous molecules.

[1239] In some embodiments, oligonucleotides utilized in accordance with the present invention are useful as anti-pathogenic agents, for example, antiviral agents, antibacterial agents, antifungal agents, and so on. Suitable targets for a variety of infectious agents such as viruses and bacteria have been reported. See, for example, U.S. Pat. Nos. 5,726,017, 5,654,151, 5,496,938, 5,503,978, 5,587,468, 5,527,894, US2005233317, U.S. Pat. No. 5,496,938, WO08 066231, JP2002165594, WO02081494, U.S. Pat. No. 5,861,501, WO9720072, U.S. Pat. Nos. 5,475,096, 6,569,630, CN101109013, and WO03106476, each of which is incorporated herein by reference in its entirety.

[1240] In some embodiments, oligonucleotides utilized in accordance with the present invention are or act as anticancer agents. Any known cancer- or tumor-associated factors, such as proteins involved in the regulation of cell division or proliferation, cell cycle progression, apoptosis, cell migration, DNA repair, etc. including structural proteins and signal transduction molecules, may be targeted by an aptamer. Examples include, without limitation, See, for example, AU Patent 775412, U.S. Pat. No. 6,232,071, WO 08/028534, U.S. Pat. No. 6,933,114, WO 04/081574, AU Patent 242462, U.S. Pat. Nos. 6,995,249, 5,668,264, 6,699,843, WO 04/094614, and U.S. Pat. No. 5,846,713, each of which is incorporated herein by reference in its entirety.

[1241] In some embodiments, oligonucleotides utilized in accordance with the present invention are or act as antiangiogenic agents. Non-limiting examples of antiangiogenic targets include VEGF and associates receptors, as well as extracellular matrix or adhesion molecules. See, for example, U.S. Pat. No. 6,051,698, US 2003175703, WO 95/21853 and U.S. Pat. No. 7,094,535, each of which is incorporated herein by reference in its entirety.

[1242] In some embodiments, oligonucleotides utilized in accordance with the present invention are or act as anticoagulant agents. Much is known about blood coagulation factors and their function as well as proteins regulation such process. Aptamers are useful in targeting one or more of such factors in treating conditions such as cardiovascular diseases and blood coagulation disorders. See for example, WO 06/033854, U.S. Pat. No. 5,543,293, WO 07/025049, U.S. Pat. No. 6,774,118, WO 07/140000, each of which is incorporated herein by reference in its entirety.

[1243] In some embodiments, oligonucleotides utilized in accordance with the present invention are or act as immunomodulatory agents. Aptamers have been generated to target immunomodulatory molecules involved in autoimmune disorders. The present invention may be useful for targeting molecules expressed on immune cells, such as T cells and antigen presenting cells (APCs). See for example, U.S. Pat. No. 5,869,641, WO 01/09160, each of which is incorporated herein by reference in its entirety. In some embodiments, molecules involved in the complement system such as C1, C4, C2, C3 and C5 may be targeted by an aptamer. The complement system has been implicated in numerous renal, rheumatological, neurological, dermatological, hematological, allergic, infectious, and other diseases. See for example, WO 97/28178 and WO 07/103549, each of which is incorporated herein by reference in its entirety. Other immune-related targets include, without limitation, IL-12, IL-23 and IL-28 (see, for example, WO 07/035922, which is incorporated herein by reference), IgE (see, for example, WO 05/113813, which is incorporated herein by reference), Sp-1 and Sp1-, CD28, IL-2, GMCSF (see, for example, U.S. Pat. No. 6,994,959, which is incorporated herein by reference), SDF-1, CXCR4 (see, for example, WO 08/009437, which is incorporated herein by reference), IL-6, IL-12, IFN gamma (see, for example, U.S. Pat. No. 6,589,940 and US2003125279, each of which is incorporated herein by reference), and TLR. Stereo-defined aptamers may elicit improved efficacy against such diseases.

[1244] In some embodiments, oligonucleotides utilized in accordance with the present invention are or act as anti-inflammatory agents. Inflammatory disease such as acute respiratory distress syndrome (ARDS), septic shock, pulmonary emphysema, cystic fibrosis, rheumatoid arthritis and chronic bronchitis, have neutrophil elastase involved in their pathogenesis. Human elastate is therefore a target for treating such disorders using an aptamer that regulates inflammation. Other suitable targets include, without limitation, phospholipase A2, such as non-pancreatic secretory PLA2 (see, for example, WO 96/27604, which is incorporated by reference), selectins, E-, P- and L- (see, for example, U.S. Pat. No. 5,780,228, which is incorporated by reference), three homologous C-type lectins, other cell adhesion molecules expressed in cells such as leukocytes, endothelial cells and platelets; MCP-1 (see, for example, WO 07/093409, which is incorporated by reference), NF-kappa B and NF-IL6 (see, for example, WO 00/24404, which is incorporated by reference). Stereo-defined aptamers may elicit improved efficacy against such diseases.

[1245] In some embodiments, oligonucleotides utilized in accordance with the present invention are useful for treating certain brain diseases, including but are not limited to: Transmissible spongiform encephalopathies (TSEs) and Alzheimer's disease. Known targets are described in publications including WO 2006/138676 and DE19916417, and WO 08/008884, each of which is incorporated herein by reference. Stereo-defined aptamers may elicit improved efficacy against such diseases.

### Decoy Oligonucleotides

[1246] In some embodiments, provided compositions include one or more oligonucleotides that are or act as decoy oligonucleotides.

[1247] Because transcription factors recognize their relatively short binding sequences, even in the absence of surrounding genomic DNA, short oligonucleotides bearing the consensus binding sequence of a specific transcription factor can be used as tools for manipulating gene expression in living cells. This strategy involves the intracellular delivery of such “decoy oligonucleotides”, which are then recognized and bound by the target factor. Occupation of the transcription factor's DNA-binding site by the decoy renders the transcription factor incapable of subsequently binding to the promoter regions of target genes. Decoys can be used as therapeutic agents, either to inhibit the expression of genes that are activated by a transcription factor, or to up-regulate genes that are suppressed by the binding of a transcription factor. Examples of the utilization of decoy oligonucleotides can be found in Mann et al., J. Clin. Invest., 2000, 106: 1071-1075, which is expressly incorporated by reference herein, in its entirety.

miRNA Mimics

[1248] In some embodiments, provided compositions include one or more oligonucleotides that are or act as miRNA mimics.

[1249] miRNA mimics represent a class of molecules that can be used to imitate the gene modulating activity of one or more miRNAs. Thus, the term “microRNA mimic” refers to synthetic non-coding RNAs (i.e. the miRNA is not obtained by purification from a source of the endogenous miRNA) that are capable of entering the RNAi pathway and regulating gene expression. miRNA mimics can be designed as mature molecules (e.g. single stranded) or mimic precursors (e.g., pri- or pre-miRNAs).

[1250] In some embodiments, miRNA mimics are double stranded molecules (e.g., with a duplex region of between about 16 and about 31 nucleotides in length) and contain one or more sequences that have identity with the mature strand of a given miRNA.

[1251] In some embodiments, an miRNA mimic comprises a duplex region of between about 16 and about 31 nucleotides. In some embodiments, provided miRNA mimic may contain one or more of the following chemical modification patterns: the sense strand contains 2′-O-methyl modifications of nucleotides 1 and 2 (counting from the 5′ end of the sense oligonucleotide), and all of the Cs and Us; the antisense strand modifications can comprise 2′ F modification of all of the Cs and Us, phosphorylation of the 5′ end of the oligonucleotide, and stabilized internucleotide linkages associated with a 2 nucleotide 3′ overhang.

### Supermirs

[1252] In some embodiments, provided compositions include one or more oligonucleotides that are or act as supermirs.

[1253] A supermir refers to an oligonucleotide, e.g., single stranded, double stranded or partially double stranded, which has a nucleotide sequence that is substantially identical to an miRNA and that is antisense with respect to its target. This term includes oligonucleotides which comprise at least one non-naturally-occurring portion which functions similarly. In some embodiments, the supermir does not include a sense strand. In some embodiments, the supermir does not self-hybridize to a significant extent. In some embodiments, a supermir has a secondary structure but is substantially single-stranded under physiological conditions. A supermir that is substantially single-stranded is single-stranded to the extent that less than about 50% (e.g., less than about 40%, 30%, 20%, 10%, or 5%) of the supermir is duplexed with itself. A supermir can include a hairpin segment, e.g., sequence, preferably at the 3′ end can self hybridize and form a duplex region, e.g., a duplex region of at least 1, 2, 3, or 4 and preferably less than 8, 7, 6, or 5 nucleotides, e.g., 5 nucleotides. The duplexed region can be connected by a linker, e.g., a nucleotide linker, e.g., 3, 4, 5, or 6 dTs, e.g., modified dTs. In some embodiments, a supermir is duplexed with a shorter oligonucleotide, e.g., of 5, 6, 7, 8, 9, or 10 nucleotides in length, e.g., at one or both of the 3′ and 5′ end or at one end and in the non-terminal or middle of the supermir.

Antimers or miRNA Inhibitors

[1254] In some embodiments, provided compositions include one or more oligonucleotides that are or act as antimers or miRNA inhibitors.

[1255] The terms “antimir” “microRNA inhibitor” or “miR inhibitor” are synonymous and refer to oligonucleotides or modified oligonucleotides that interfere with the activity of specific miRNAs. Inhibitors can adopt a variety of configurations including single stranded, double stranded (RNA/RNA or RNA/DNA duplexes), and hairpin designs. In some embodiments, microRNA inhibitors comprise one or more sequences or portions of sequences that are complementary or partially complementary with the mature strand (or strands) of the miRNA to be targeted. In some embodiments, miRNA inhibitors comprise additional sequences located 5′ and 3′ to the sequence that is the reverse complement of the mature miRNA. Additional sequences can be the reverse complements of the sequences that are adjacent to the mature miRNA in the primiRNA from which the mature miRNA is derived, or additional sequences can be arbitrary sequences (having a mixture of A, G, C, U, or dT). In some embodiments, one or both of the additional sequences are arbitrary sequences capable of forming hairpins. Thus, in some embodiments, the sequence that is the reverse complement of the miRNA is flanked on the 5′ side and on the 3′ side by hairpin structures. In some embodiments, microRNA inhibitors are double stranded. In some embodiments, microRNA inhibitors are double stranded and include mismatches between nucleotides on opposite strands. In some embodiments, microRNA inhibitors are linked to conjugate moieties in order to facilitate uptake of the inhibitor into a cell.

[1256] MicroRNA inhibitors, including hairpin miRNA inhibitors, are described in detail in Vermeulen et al., “Double-Stranded Regions Are Essential Design Components Of Potent Inhibitors of RISC Function,” RNA 13: 723-730 (2007) and in WO2007/095387 and WO 2008/036825 each of which is incorporated herein by reference in its entirety.

[1257] An exemplary application of miRNA-based therapy is described in Pan et al. (2007) World J Gastroenterol 13(33): 4431-36, “New therapeutic opportunities for Hepatitis C based on small RNA,” the contents of which are incorporated by reference. Briefly, the authors describe 22 nucleotide mature miR-122, derived from a noncoding polyadenylated RNA transcript of the hcr gene, which is a liver-specific developmental regulator. Because miR-122 is a liver specific miRNA that is involved in HCV viral replication, silencing of miR-122 can be useful for the treatment of HCV.

### Antagomirs

[1258] In some embodiments, provided compositions include one or more oligonucleotides that are or act as antagomirs.

[1259] Antagomirs are RNA-like oligonucleotides that harbor various modifications for RNAse protection and pharmacologic properties, such as enhanced tissue and cellular uptake. They differ from normal RNA by, for example, complete 2′-O-methylation of sugar, phosphorothioatc intersugar linkage and, for example, a cholesterol-moiety at 3′-end. In some embodiments, an antagomir comprises a 2′-O-methylmodification at all nucleotides, a cholesterol moiety at 3′-end, two phosphorothioate intersugar linkages at the first two positions at the 5′-end and four phosphorothioate linkages at the 3′-end of the molecule. Antagomirs can be used to efficiently silence endogenous miRNAs by forming duplexes comprising the antagomir and endogenous miRNA, thereby preventing miRNA-induced gene silencing. An example of antagomir-mediated miRNA silencing is the silencing of miR-122, described in Krutzfeldt et al, Nature, 2005, 438: 685-689, which is incorporated by reference herein in its entirety.

### Modified Single Oligonucleotide Variations

[1260] Typically, it is perceived that two components are required to activate RNAi machinery—the double-stranded nucleic acid motif, which is required for recognition by RNAi-associated proteins and the guide strand which serves as the mRNA binding co-factor in the RISC's Argonaute catalytic protein. More recently, a novel type of RNAi molecules composed of a single, short (25-28 nt) oligo capable of self-dimerizing into a partially complementary duplex have been developed. These molecules were demonstrated to efficiently activate the RISC and to produce target mRNA silencing comparable to that obtained with potent conventional RNAi molecules. See: Lapierre et al., “Potent and systematic RNAi mediated silencing with single oligonucleotide compounds.” RNA 2011; 17:00, the contents of which are hereby incorporated by reference. See also: WO 2010/090762 “RNA DUPLEXES WITH SINGLE STRANDED PHOSPHOROTHIOATE NUCLEOTIDE REGIONS FOR ADDITIONAL FUNCTIONALITY” (PCT/US2010/00348), the contents of which are hereby incorporated by reference.

[1261] Thus, the present invention includes RNAi constructs containing single stranded regions of phosphorothioate modified nucleotides, and the uses of such constructs in gene silencing.

[1262] In some embodiments, the invention utilizes isolated double stranded nucleic acid molecules including a guide strand and a passenger strand, wherein the passenger strand is connected through a cleavable linker to a single stranded region of at least eight phosphorothioate modified nucleotides. In some embodiments, the invention is an isolated double stranded nucleic acid molecule having a guide strand and a passenger strand, wherein at least one of the guide strand and passenger strand is connected through a cleavable linker to a single stranded region of at least six phosphorothioate modified nucleotides.

[1263] In some embodiments, the invention utilizes an isolated double stranded nucleic acid molecule having a guide strand and a passenger strand, wherein at least one of the guide strand and passenger strand is connected through a cleavable linker to a single stranded region of at least three phosphorothioate modified nucleotides. In some embodiments, the double stranded nucleic acid molecule includes at least one of the following properties. The passenger strand may be 8-18 nucleotides in length. The nucleic acid may have at least one 2′ O methyl or 2′ fluoro modification. The cleavable linkage may be other than a nucleotidic linkage. The nucleic acid may include a lipophilic group. The guide strand may be 16-18 nucleotides or 26-28 nucleotides in length. In some embodiments the single stranded region is connected to the guide strand.

[1264] In some embodiments, the cleavable linker includes one or more unmodified nucleotides. In other embodiments, the cleavable linker is a phosphodiester bond. In certain embodiments, the cleavable linker is S—S. In some embodiments the cleavable linker is DNA or RNA. The single stranded region of at least eight phosphorothioate modified nucleotides can be at either the 3′ or 5′ end of the passenger strand. In some embodiments, the single stranded region of at least eight phosphorothioate modified nucleotides is DNA, while in other embodiments it is RNA.

[1265] In some embodiments the double stranded region of the nucleic acid molecule is a perfect duplex. In other embodiments the double stranded region contains at least one bulge region. In some embodiments the passenger strand comprises a nick within the double stranded region of the molecule. The double stranded region may contain at least one nucleotide that is phosphorothioate modified.

[1266] Nucleic acid molecules utilized in accordance with the invention may be chemically modified. In certain embodiments the chemical modification is 2′Omethyl and/or 2′Fluoro. In some embodiments more than one chemical modification is present in the same molecule. In some embodiments chemical modification increases stability, increases evasion of immune regulation, and/or prevents off-target gene silencing. Chemical modification can be present on the passenger strand and/or the guide strand. In some embodiments the single stranded region of at least eight phosphorothioate modified nucleotides is cleaved from the double stranded region of the nucleic acid molecule in a cell. In some embodiments the single stranded region of at least eight phosphorothioate modified nucleotides has complementarity to a mammalian gene. In certain embodiments the single stranded region of at least eight phosphorothioate modified nucleotides functions as an antisense molecule. The double stranded region may be at least 19 nucleotides long. In some embodiments the single stranded region is at least 12 nucleotides long.

[1267] In some embodiments, the invention utilizes bifunctional nucleic acid molecule including a double stranded region that functions in RNA interference and a single stranded region that functions in antisense, wherein the double stranded region comprises a guide strand and a passenger strand, and wherein the double stranded region and the single stranded region are connected through a cleavable linker. In some embodiments, the cleavable linker includes one or more unmodified nucleotides. In other embodiments, the cleavable linker is a phosphodiester bond. In certain embodiments, the cleavable linker is S—S. In some embodiments the cleavable linker is DNA or RNA.

[1268] In some embodiments, the invention relates to methods for inhibiting the expression of a target gene in a mammalian cell, including contacting the mammalian cell with an isolated double stranded nucleic acid molecule comprising a guide strand and a passenger strand, wherein the passenger strand is connected through a cleavable linker to a single stranded region of at least eight phosphorothioate modified nucleotides. In some embodiments, the cleavable linker includes one or more unmodified nucleotides. In other embodiments, the cleavable linker is a phosphodiester bond. In certain embodiments, the cleavable linker is S—S. In some embodiments the cleavable linker is DNA or RNA.

[1269] In some embodiments, the single stranded region comprises at least eight phosphorothioate modified nucleotides and can be at either the 3′ or 5′ end of the passenger strand. In some embodiments, the single stranded region of at least eight phosphorothioate modified nucleotides is DNA, while in other embodiments it is RNA. In some embodiments the double stranded region of the nucleic acid molecule is a perfect duplex. In other embodiments the double stranded region contains at least one bulge region. In some embodiments the passenger strand comprises a nick within the double stranded region of the molecule. The double stranded region may contain at least one nucleotide that is phosphorothioate modified.

[1270] Nucleic acid molecules utilized in accordance with the invention may be chemically modified. In certain embodiments the chemical modification is 2′Omethyl and/or 2′Fluoro. In some embodiments more than one chemical modification is present in the same molecule. In some embodiments chemical modification increases stability, increases evasion of immune regulation, and/or prevents off-target gene silencing. Chemical modification can be present on the passenger strand and/or the guide strand.

[1271] In some embodiments the single stranded region of at least eight phosphorothioate modified nucleotides is cleaved from the double stranded region of the nucleic acid molecule in a cell. In some embodiments the single stranded region of at least eight phosphorothioate modified nucleotides has complementarity to a mammalian gene. In certain embodiments the single stranded region of at least eight phosphorothioate modified nucleotides functions as an antisense molecule. The double stranded region may be at least 19 nucleotides long. In some embodiments the single stranded region is at least 12 nucleotides long.

[1272] In some embodiments, the invention relates to methods for inhibiting the expression of a target gene in a mammalian cell, comprising contacting the mammalian cell with an isolated double stranded nucleic acid molecule comprising a guide strand and a passenger strand, wherein the guide strand is connected through a cleavable linker to a single stranded region of at least eight phosphorothioate modified nucleotides. In some embodiments, the cleavable linker includes one or more unmodified nucleotides. In other embodiments, the cleavable linker is a phosphodiester bond. In certain embodiments, the cleavable linker is S—S. In some embodiments the cleavable linker is DNA or RNA.

[1273] In some embodiments, the invention relate to methods for inhibiting the expression of a target gene in a mammalian cell, including contacting the mammalian cell with a bifunctional nucleic acid molecule including a double stranded region that functions in RNA interference and a single stranded region that functions in antisense, wherein the double stranded region includes a guide strand and a passenger strand, and wherein the double stranded region and the single stranded region are connected through a cleavable linker. In other aspects a method for inhibiting the expression of a target gene in a mammalian cell is provided. The method involves contacting the mammalian cell with any of the isolated double stranded nucleic acid molecules described herein.

[1274] In some embodiments, isolated double stranded nucleic acid molecules utilized in accordance with the present invention include a chemical modification that increases stability. In some embodiments, isolated double stranded nucleic acid molecules include a chemical modification that increases evasion of immune regulation. In some embodiments, the isolated double stranded nucleic acid molecules include a chemical modification that prevents off-target gene silencing.

[1275] In some embodiments, as discussed herein, utilized oligonucleotides are single oligonucleotide molecules capable of self-dimerizing into a partially complementary duplex. In some embodiments, such single oligonucleotides are about 23-30 nucleotides in length, e.g., 23, 24, 25, 26, 27, 28, 29, and 30. In some embodiments, single oligonucleotides capable of self-dimerizing into a partially complementary duplex contain about 14-18 nucleotide mRNA targeting region, e.g., 14, 15, 16, 17, and 18. In some embodiments, single oligonucleotides capable of self-dimerizing into a partially complementary duplex contain an additional 7-11, e.g., 7, 8, 9, 10, and 11 nucleotides to enable self-dimerization into a partially complementary duplex. In some embodiments, single oligonucleotides capable of self-dimerizing into a partially complementary duplex can efficiently enter and activate the RNA-induced silencing complex (RISC).

### Ul Adaptors

[1276] In some embodiments, provided compositions include one or more oligonucleotides that are or act as U1 adaptors.

[1277] U1 adaptors inhibit polyA sites and are bifunctional oligonucleotides with a target domain complementary to a site in the target gene's terminal exon and a ‘Ul domain’ that binds to the Ul smaller nuclear RNA component of the Ul snRNP. See for example, Int. Pat. App. Pub. No. WO2008/121963 and Goraczniak, et al., 2008, Nature Biotechnology, 27(3), 257-263, each of which is incorporated by reference herein, in its entirety. Ul snRNP is a ribonucleoprotein complex that functions primarily to direct early steps in spliceosome formation by binding to the pre-mRNA exon-intron boundary, Brown and Simpson, 1998, Annu Rev Plant Physiol Plant Mol Biol 49:77-95.

[1278] In some embodiments, a utilized oligonucleotide is a Ul adaptor, wherein the oligonucleotide comprises at least one annealing domain (targeting domain) linked to at least one effector domain (Ul domain), wherein the annealing domain hybridizes to a target gene sequence and the effector domain hybridizes to the Ul snRNA of Ul snRNP. In some embodiments, the Ul adaptor comprises one annealing domain. In some embodiments, the Ul adaptor comprises one effector domain.

[1279] Without wishing to be bound by theory, the annealing domain will typically be from about 10 to about 50 nucleotides in length, more typically from about 10 to about 30 nucleotides or about 10 to about 20 nucleotides. In some embodiments, the annealing, domain is 10, 11, 12, 13, 14, 15, 16, 17, 18, 19, 20, or 21 nucleotides in length. The annealing domain may be at least 75%, at least 80%, at least 85%, at least 90%, at least 95%, at least 97%, or at least about 100% complementary to the target gene. In some embodiments, the annealing domain hybridizes with a target site within the Y terminal exon of a pre-MRNA, which includes the terminal coding region and the 3′UTR and polyadenylation signal sequences (e.g., through the polyadenylation site). In some embodiments, the target sequence is within about 500 ‘basepair, about 250 basepair, about 100 basepair, or about 50-basepair of the poly (A) signal sequence of the, pre-mRNA. In some embodiments, the annealing domain comprises 1, 2, 3, or 4, mismatches with the target gene sequence.

[1280] In some embodiments, the effector domain is from about 8 nucleotides to about 30 nucleotides in length. In some embodiments, the effector domain is from about 10 nucleotides to about 20 nucleotides in length. In some embodiments, the effector domain is from about 10 nucleotides to about 15 nucleotides in length. The Ul domain can hybridize with UI snRNA, particularly the 5′ end and more specifically nucleotides 2-11. In some embodiments, the Ul domain. is perfectly complementary to nucleotides 2-11 of endogenous U1 snRNA. In some embodiments, the U1 domain comprises a nucleotide sequence selected from the group consisting of SEQ ID NO: 2299 (5′-GCCAGGUAAGUAU-3′), SEQ ID NO: 2300 (5′-CCAGGUAAGUAU-3′). SEQ ID NO: 2301 (5′-CAGGUAAGUAU-3′), SEQ ID NO: 2302 (5′-CAGGUAAGU-3′), SEQ ID NO: 2303 (5′-CAGGUAAG-3′), and SEQ ID NO: 2304 (5′-CAGGUAA 3′). In some embodiments. the III domain comprises a nucleotide sequence, SEQ ID NO: 2305 (5′-CAGGUAAGUA-3′). Without wishing to be bound by theory, increasing the length of the Ul domain to include basepairing into stem 1 and/or basepairing to position 1 of U1 snRNA improves the U1 adaptor's affinity to Ul snRNA.

[1281] The annealing and effector domains of the Ul adaptor can be linked such that the effector domain is at the 5′ end and/or 3′ end of the annealing domain. The two domains can be linked by such that the 3′ end of one domain is linked to 5′ end of the other domain, or 3′ end of one domain is linked to 3′ end of the other domain, or 5′ end of one domain is linked to 5′ end of the other domain. The annealing and effector domains can be linked directly to each other or by a nucleotide based or non-nucleotide based linker. In some embodiments, a linker is nucleotide base and comprises 1, 2, 3, 4, 5, 6, 7, 8, 9, 10, up to 15, up to 20, or up to 25 nucleotides.

[1282] In some embodiments, a linker between an annealing domain and an effector domain is multivalent, e.g., trivalent, tetravalent. pentavalent. Without wishing to be bound by theory, a multivalent linker can be used to link together a single annealing domain with a plurality of adaptor domains.

[1283] In some embodiments, a Ul adaptor comprises any oligonucleotide modification described herein. Exemplary such modifications include those that increase annealing affinity, specificity, bioavailability in the cell and organism, cellular and/or nuclear transport, stability, and/or resistance to degradation. In some embodiments, the Ul adaptor can be administered in combination with at least one other RNAi agent.

### RNA Activators

[1284] In some embodiments, provided compositions include one or more oligonucleotides that are or act as RNA activators.

[1285] Recent studies have found that dsRNA can also activate gene expression, a mechanism that has been termed “small RNA-induced gene activation” or RNAa. See for example Li, L. C. et al. Proc Natl Auld Sci USA. (2006), 103(46):17337-42 and Li L. C. (2008). “Small RNAMediated Gene Activation”. RNA and the Regulation of Gene Expression: A Hidden Layer of Complexity. Caister Academic Press. ISBN 978-1-904455-25-7. It has been shown that dsRNAs targeting gene promoters induce potent transcriptional activation of associated genes. Endogenous miRNA that cause RNAa has also been found in humans. Check E. Nature (2007). 448 (7156): 855-858.

[1286] Another observation is that gene activation by RNAa is long-lasting. Induction of gene expression has been seen to last for over ten days. The prolonged effect of RNAa could be attributed to epigenetic changes at dsRNA target sites.

[1287] In some embodiments, a provided oligonucleotide is an RNA activator, wherein a provided oligonucleotide increases the expression of a gene. In some embodiments, increased gene expression inhibits viability, growth development, and/or reproduction.

Non-Coding RNAs (ncRNAs)

[1288] The present invention encompasses non-coding RNAs, such as long non-coding RNAs (lncRNAs) and short non-coding RNAs (sncRNAs).

[1289] Accordingly, provided oligonucleotide compositions of the present invention may be useful for modulating disease-associated long non-coding RNA. In some embodiments, oligonuclotides synthesized according to the methods provided herein are used to specifically block the binding of transcriptional repressor complexes to target lncRNA regions, thereby inducing the expression of the associated target gene. In some embodiments, the transcriptional repressor complex is a silencing factor. In some embodiments, the transcriptional repressor complex has Histone methyltransferase activity. In some embodiments, the transcriptional repressor complex methylates histone H3. In some embodiments, the transcriptional repressor complex is PRC2 (Polycomb Repressive Complex 2).

[1290] Certain PRC2-associated lncRNAs have been reported to be potential therapeutic targets and/or biomarkers (Zhao et al., 2010. “Genome-wide Identification of Polycomb-Associated RNAs by RIP-seq” Molecular Cell 40: 939-53). Overexpression of PCR2 proteins have been linked to various types of cancer, including metastatic prostate and breast cancer, and cancers of the colon, breast, and liver. Pharmacological inhibition of PRC2-mediated gene repression was found to induce apoptosis in several cancer cell lines in vitro, but not in various types of normal cells. Induction of apoptosis in this system is dependent on reactivation of genes that had been repressed by PRC2. There is also evidence that PRC2-mediated gene repression may be linked to the maintenance of the stem-cell properties of cancer stem cells. These results suggest that at least in some cases, inhibition of PRC2-mediated gene repression-including via targeting lncRNAs that recruit PRC2 to critical genes—is a potential strategy for treating various types of cancer. Non-limiting sequences of nucleic acids, which can be prepared in accordance with the methods provided herein, can be found in, for example, International Patent Publication WO 2012/065143 entitled “Polycomb-associated non-coding RNAs” (PCT/US2011/60493), the contents of which are incorporated by reference herein.

[1291] Provided oligonucleotide compositions of the present invention may be or act as small non-coding RNAs, such as piwi-interacting RNAs (piRNAs). The piRNAs represent the largest class of small non-coding RNA molecules that is expressed in animal cells and are found in clusters throughout the genome. piRNAs are known to form RNA-protein complexes through interactions with piwi proteins. piRNA complexes have been implicated in both epigenetic and post-transcriptional gene silencing of retrotransposons and other genetic elements in germ cells, including spermatogenesis. Typically piRNAs are 26-31 nucleotides in length, and, as compared to typical miRNAs, they lack sequence conservation and exhibit higher complexity. In some embodiments, oligonucleotide compositions utilized in accordance with the present invention comprise 5′ uridine. In some embodiments, oligonucleotide compositions utilized in accordance with the present invention comprise 5′ monophosphonate and a 3′ modification that acts to block either the 2′ or 3′ oxygen. In some embodiments, the 3′ modification is a 2′-O-methylation.

### Triplex Forming Oligonucleotides

[1292] In some embodiments, provided compositions include one or more oligonucleotides that are or act as triplex-forming oligonucleotides.

[1293] Recent studies have shown that triplex forming oligonucleotides (TFO) can be designed which can recognize and bind to polypurine/polypyrimidine regions in double-stranded helical DNA in a sequence-specific manner. These recognition rules are outline by Maher III, L. J., et al., Science (1989) vol. 245, pp 725-730; Moser, H. E., et al., Science (1987) vol. 238, pp 645-630; Beal, P. A., et al., Science (1992) vol. 251, pp 1360-1363; Conney, M., et al., Science (1988) vol. 241, pp 456-459 and Hogan, M. E., et al., EP Publication 375408. Modification of the oligonucleotides, such as the introduction of intercalators and intersugar linkage substitutions, and optimization of binding conditions (pH and cation concentration) have aided in. overcoming inherent obstacles to TFO activity such as charge repulsion and instability, and it was recently shown that oligonucleotides can be targeted to specific sequences (for a recent review sec Seidman and Glazer, Clin Invest 2003 2:487-94). In general the triplex-forming oligonucleotide has the sequence correspondence:
[1294] oligo 3′-A G G T
[1295] duplex 5′-A G C T
[1296] duplex 3′-T C G A

[1297] However, it has been shown that the A-AT and G-GC triplets have the greatest triple helical stability (Reither and Jeltsch, BMC Biochem, 2002, Sep. 12, Epub). The same authors have demonstrated that TFOs designed according to the A-AT and G-GC rule do not form non-specific triplexes, indicating that the triplex formation is indeed sequence specific. Thus for any given sequence a triplex forming sequence can be devised. In some embodiments, triplex-forming oligonucleotides are at least about 15, about 25, or about 30 or more nucleotides in length. In some embodiments, triplex-forming oligonucleotides are up to about 50 or about 100 nucleotides in length.

[1298] Formation of the triple helical structure with the target DNA induces steric and functional changes, blocking transcription initiation and elongation, allowing the introduction of desired sequence changes in the endogenous DNA and resulting in the specific down-regulation of gene expression. Examples of such suppression of gene expression in cells treated with TFOs include knockout of episomal supFGI and endogenous HPRT genes in mammalian cells (Vasquez et al., Nucl Acids Res. 1999; 27: 1176-81, and Puri, et al, J Biol Chem, 2001; 276:28991-98), and the sequence- and target specific downregulation of expression of the Ets2 transcription factor, important in prostate cancer etiology (Carbone, et al, Nucl Acid Res. 2003; 31:833-43), and the pro-inflammatory ICAM-I gene (Besch et al, J Biol Chem, 2002; 277:32473-79). In addition, Vuyisich and Beal have recently shown that sequence specific TFOs can bind to dsRNA, inhibiting activity dsRNA-dependent enzymes such as RNA-dependent kinases (Vuyisich and Beal, Nuc, Acids Res 2000; 28:2369-74).

[1299] Additionally, TF0s designed according to the abovementioned principles can induce directed mutagenesis capable of effecting DNA repair, thus providing both down-regulation and up-regulation of expression of endogenous genes (Seidman and Glazer, J Invest 2003; 112:487-94). Detailed description of the design, synthesis and administration of effective TFOs can be found. S. Pat. App. Nos. 2003 017068 and 2003 0096980 to Froehier et at and 2002 012821/8 and 2002 0123476 to Emanude et aE, and U.S. Pat. No. 5,721,138 to Lawn, the contents of which are herein incorporated in their entireties.

### Conjugates/Linkers

[1300] The invention also contemplates that utilized oligonucleotides, in some embodiments, are optimized for cellular uptake. In any utilized oligonucleotides embraced by the present invention, guide and/or passenger strands may be attached to a conjugate. In some embodiments the conjugate is hydrophobic. The hydrophobic conjugate can be a small molecule with a partition coefficient that is higher than 10. The conjugate can be a sterol-type molecule such as cholesterol, or a molecule with an increased length polycarbon chain attached to C17, and the presence of a conjugate can influence the ability of an RNA molecule to be taken into a cell with or without a lipid transfection reagent. The conjugate can be attached to the passenger or guide strand through a hydrophobic linker. In some embodiments, a hydrophobic linker is 5-12C in length, and/or is hydroxypyrrolidine-based. In some embodiments, a hydrophobic conjugate is attached to the passenger strand and the CU residues of either the passenger and/or guide strand are modified. In some embodiments, at least 50%, 55%, 60%, 65%, 70%, 75%, 80%, 85%, 90% or 95% of the CU residues on the passenger strand and/or the guide strand are modified. In some aspects, molecules associated with the invention are self-delivering (sd). As used herein, “self-delivery” refers to the ability of a molecule to be delivered into a cell without the need for an additional delivery vehicle such as a transfection reagent. Aspects of the invention relate to selecting molecules for use in RNAi.

[1301] In any of the embodiments embraced herein, utilized oligonucleotides may be associated with a hydrophobic moiety for targeting and/or delivery of the molecule to a cell. In some embodiments, the hydrophobic moiety is associated with the nucleic acid molecule through a linker. In some embodiments, the association is through non-covalent interactions. In other some, the association is through a covalent bond. Any linker known in the art may be used to associate the nucleic acid with the hydrophobic moiety. Linkers known in the art are described in published international PCT applications, WO 92/03464, WO 95/23162, WO 2008/021157, WO 2009/021157, WO 2009/134487, WO 2009/126933, U.S. Patent Application Publication 2005/0107325, U.S. Pat. Nos. 5,414,077, 5,419,966, 5,512,667, U.S. Pat. Nos. 5,646,126, and 5,652,359, which are incorporated herein by reference. The linker may be as simple as a covalent bond to a multi-atom linker. The linker may be cyclic or acyclic. The linker may be optionally substituted. In some embodiments, the linker is capable of being cleaved from the nucleic acid. In certain embodiments, the linker is capable of being hydrolyzed under physiological conditions. In some embodiments, the linker is capable of being cleaved by an enzyme (e.g., an esterase or phosphodiesterase). In some embodiments, the linker comprises a spacer element to separate the nucleic acid from the hydrophobic moiety. The spacer element may include one to thirty carbon or heteroatoms. In certain embodiments, the linker and/or spacer element comprises protonatable functional groups. Such protonatable functional groups may promote the endosomal escape of the nucleic acid molecule. The protonatable functional groups may also aid in the delivery of the nucleic acid to a cell, for example, neutralizing the overall charge of the molecule. In some embodiments, the linker and/or spacer element is biologically inert (that is, it does not impart biological activity or function to the resulting nucleic acid molecule).

[1302] The hydrophobic molecule may be connected to the polynucleotide by a linker moiety. Optionally the linker moiety is a non-nucleotidic linker moiety. Non-nucleotidic linkers are e.g. abasic residues (dSpacer), oligoethyleneglycol, such as triethyleneglycol (spacer 9) or hexaethylenegylcol (spacer 18), or alkane-diol, such as butanediol. The spacer units are preferably linked by phosphodiester or phosphorothioate bonds. The linker units may appear just once in the molecule or may be incorporated several times, e.g. via phosphodiester, phosphorothioate, methylphosphonate, or amide linkages.

[1303] Typical conjugation protocols involve the synthesis of polynucleotides bearing an aminolinker at one or more positions of the sequence, however, a linker is not required. The amino group is then reacted with the molecule being conjugated using appropriate coupling or activating reagents. The conjugation reaction may be performed either with the polynucleotide still bound to a solid support or following cleavage of the polynucleotide in solution phase. Purification of the modified polynucleotide by HPLC typically results in a pure material.

[1304] In some embodiments, a linking group can be attached to a nucleomonomer and the transporting peptide can be covalently attached to the linker. In some embodiments, a linker can function as both an attachment site for a transporting peptide and can provide stability against nucleases. Examples of suitable linkers include substituted or unsubstituted C₁-C₂₀ alkyl chains, C₂-C₂₀ alkenyl chains, C₂-C₂₀ alkynyl chains, peptides, and heteroatoms (e.g., S, O, NH, etc.). Other exemplary linkers include bifunctional crosslinking agents such as sulfosuccinimidyl-4-(maleimidophenyl)-butyrate (SMPB) (see, e.g., Smith et al. Biochem J 1991.276: 417-2).

[1305] In some embodiments, provided oligonucleotides of the invention are synthesized as molecular conjugates which utilize receptor-mediated endocytotic mechanisms for delivering genes into cells (see, e.g., Bunnell et al. 1992. Somatic Cell and Molecular Genetics. 18:559, and the references cited therein).

### Targeting Agents

[1306] In some embodiments, provided compositions include one or more targeting agents, associated with the composition and/or with individual oligonucleotides therein. Exemplary such targeting agents are described above and further herein. The phrases “targeting agent” and “targeting moiety” are used herein interchangeably.

[1307] Delivery of oligonucleotides and/or compositions thereof can often be improved by targeting the oligonucleotides to a cellular receptor. The targeting moieties can be conjugated to the oligonucleotides or attached to a carrier group (i.e., poly(L-lysine) or liposomes) linked to the oligonucleotides. This method is well suited to cells that display specific receptor-mediated endocytosis.

[1308] For instance, oligonucleotide conjugates to 6-phosphomannosylated proteins are internalized 20-fold more efficiently by cells expressing mannose 6-phosphate specific receptors than free oligonucleotides. The oligonucleotides may also be coupled to a ligand for a cellular receptor using a biodegradable linker. In another example, the delivery construct is mannosylated streptavidin which forms a tight complex with biotinylated oligonucleotides. Mannosylated streptavidin was found to increase 20-fold the internalization of biotinylated oligonucleotides. (Vlassov et al. 1994. Biochimica et Biophysica Acta 1197:95-108).

[1309] The field of RNA interference has revolutionized the study of biological processes. These tools include small inhibitory RNA (siRNA), small hairpin RNA (shRNA) and ribozymes. As RNA interference technology has grown, so has the list of validated RNA target sequences and reagents for use. Provided compositions and methods embraced by the present application can be readily applied to each of such target sequences. For a database of validated siRNA target sequences and links to kits and reagents that may be used for RNA interference experiments, see, for example, http://www.rnainterference.org/index.html. Exemplary siRNA target sequences useful for the present invention are provided in the accompanying Appendix (A).

### Immunomodulatory Oligonucleotides

[1310] In some embodiments, provided compositions include one or more oligonucleotides that are or act as immunomodulatory oligonucleotides.

[1311] Oligonucleotides utilized in accordance with the invention can be immunomodulatory agents, i.e., agents that are capable of modulating or regulating an immune response when administered to a subject. Immune responses elicited by such an agent can be an innate and/or an adaptive immune response. The immune system is divided into a more innate immune system, and acquired adaptive immune system of vertebrates, the latter of which is further divided into humoral cellular components. In some embodiments, the immune response can be mucosal. Immunomodulatory motifs described herein can be used in the context of previously described classes of immunomodulatory oligonucleotides including ODN classes such as A class, B class, C class, E class, T class and P class.

[1312] In some embodiments of the invention immunomodulatory oligonucleotides utilized in accordance with the present invention include one or more immunostimulatory motifs. In some embodiments, oligonucleotides utilized in accordance with the present invention include one or more “CpG dinucleotides.” A CpG dinucleotide can be methylated or unmethylated. An immunostimulatory oligonucleotide containing at least one unmethylated CpG dinucleotide is an oligonucleotide molecule which contains an unmethylated cytosine-guanine dinucleotide sequence (i.e., an unmethylated 5′ cytidine followed by 3′ guanosine and linked by a phosphate bond) and which activates the immune system; such an immunostimulatory oligonucleotide is a CpG oligonucleotide. CpG oligonucleotides have been described in a number of issued patents, published patent applications, and other publications, including: U.S. Pat. Nos. 6,194,388; 6,207,646; 6,214,806; 6,218,371; 6,239,116; and 6,339,068, the contents of which are incorporated herein by reference. In some embodiments, utilized oligonucleotides are or act as an agonist for a Toll-like receptor. In some embodiments, utilized oligonucleotides are or act as an agonist for Toll-like receptor 9 (TLR9). In some embodiments, utilized oligonucleotides are or act as an antagonist for a Toll-like receptor. In some embodiments, utilized oligonucleotides are or act as an antagonist for Toll-like receptor 9 (TLR9). In some embodiments, stereo-defined oligonucleotides embraced by the invention exhibit greater affinity for respective receptor/target, as compared to stereo-random counterpart. In some embodiments, stereo-defined oligonucleotides embraced by the invention elicit one or more immune responses, when administered to subjects that meet certain clinical criteria, with less degree of variables amongst the population, as compared to stereo-random counterpart. In some embodiments, stereo-defined oligonucleotides embraced by the invention cause less degree of toxic side effects or fewer side effects, when administered to subjects that meet certain clinical criteria, as compared to stereo-random counterpart.

[1313] In some embodiments, immunostimulatory oligonucleotides utilized in accordance with the present invention are free of CpG dinucleotide motifs. These oligonucleotides which are free of CpG dinucleotides are referred to as non-CpG oligonucleotides, and they have non-CpG immunostimulatory motifs. In some embodiments, these are T-rich immunostimulatory oligonucleotides, such as oligonucleotides having at least 80% T.

[1314] In some embodiments, immunostimulatory oligonucleotides utilized in accordance with the present invention are B class immunomodulatory oligonucleotides.

[1315] “B class” ODN are potent at activating B cells but are relatively weak in inducing IFN-α and NK cell activation. The B class CpG oligonucleotides typically are fully stabilized and include an unmethylated CpG dinucleotide within certain preferred base contexts. See, e.g., U.S. Pat. Nos. 6,194,388; 6,207,646; 6,214,806; 6,218,371; 6,239,116; and 6,339,068.

[1316] Another class is potent for inducing IFN-α and NK cell activation but is relatively weak at stimulating B cells; this class has been termed the “A class”. In some embodiments, immunostimulatory oligonucleotides utilized in accordance with the present invention are A class immunomodulatory oligonucleotides. The A class CpG oligonucleotides typically have stabilized poly-G sequences at 5′ and 3′ ends and a palindromic phosphodiester CpG dinucleotide-containing sequence of at least 6 nucleotides. See, for example, published patent application PCT/US00/26527 (WO 01/22990).

[1317] Yet another class of CpG oligonucleotides activates B cells and NK cells and induces IFN-α; this class has been termed the C-class. In some embodiments, immunostimulatory oligonucleotides utilized in accordance with the present invention are C class immunomodulatory oligonucleotides. The “C class” immunostimulatory oligonucleotides contain at least two distinct motifs have unique and desirable stimulatory effects on cells of the immune system. Some of these ODN have both a traditional “stimulatory” CpG sequence and a “GC-rich” or “B-cell neutralizing” motif. These combination motif oligonucleotides have immune stimulating effects that fall somewhere between those effects associated with traditional “class B” CpG ODN, which are strong inducers of B cell activation and dendritic cell (DC) activation, and those effects associated with a more recently described class of immune stimulatory oligonucleotides (“class A” CpG ODN) which are strong inducers of IFN-α and natural killer (NK) cell activation but relatively poor inducers of B-cell and DC activation. Krieg A M et al. (1995) Nature 374:546-9; Ballas Z K et al. (1996) J Immunol 157:1840-5; Yamamoto S et al. (1992) J Immunol 48:4072-6. While preferred class B CpG ODN often have phosphorothioate backbones and preferred class A CpG ODN have mixed or chimeric backbones, the C class of combination motif immune stimulatory oligonucleotides may have either stabilized, e.g., phosphorothioate, chimeric, or phosphodiester backbones, and in some preferred embodiments, they have semi-soft backbones. This class has been described in U.S. patent application Ser. No. 10/224,523 filed on Aug. 19, 2002, the entire contents of which is incorporated herein by reference.

[1318] In some embodiments, immunostimulatory oligonucleotides utilized in accordance with the present invention are E class immunomodulatory oligonucleotides. The “E class” oligonucleotides have an enhanced ability to induce secretion of IFN-alpha. These ODN have a lipophilic substituted nucleotide analog 5′ and/or 3′ of a YGZ motif. The compound of the E class formula may be, for example, any of the following lipophilic substituted nucleotide analogs: a substituted pyrimidine, a substituted uracil, a hydrophobic T analog, a substituted toluene, a substituted imidazole or pyrazole, a substituted triazole, 5-chloro-uracil, 5-bromo-uracil, 5-iodo-uracil, 5-ethyl-uracil, 5-propyl-uracil, 5-propinyl-uracil, (E)-5-(2-bromovinyl)-uracil, or 2.4-difluoro-toluene. E class oligonucleotides are described at least in provisional patent application U.S. 60/847,811.

[1319] In some embodiments, immunostimulatory oligonucleotides utilized in accordance with the present invention are T class immunomodulatory oligonucleotides. The “T class” oligonucleotides induce secretion of lower levels of IFN-alpha when not modified as in the ODNs of the invention and IFN-related cytokines and chemokines than B class or C class oligonucleotides, while retaining the ability to induce levels of IL-10 similar to B class oligonucleotides. T class oligonucleotides are described at least in U.S. patent application Ser. No. 11/099,683, the entire contents of which are hereby incorporated by reference.

[1320] In some embodiments, immunostimulatory oligonucleotides utilized in accordance with the present invention are P class immunomodulatory oligonucleotides. The “P class” immunostimulatory oligonucleotides have several domains, including a 5TLR activation domain, 2 duplex forming regions and an optional spacer and 3′ tail. This class of oligonucleotides has the ability in some instances to induce much higher levels of IFN-α secretion than the C-Class. The P-Class oligonucleotides have the ability to spontaneously self-assemble into concatamers either in vitro and/or in vivo. Without being bound by any particular theory for the method of action of these molecules, one potential hypothesis is that this property endows the P-Class oligonucleotides with the ability to more highly crosslink TLR9 inside certain immune cells, inducing a distinct pattern of immune activation compared to the previously described classes of CpG oligonucleotides. Cross-linking of TLR9 receptors may induce activation of stronger IFN-α secretion through the type I IFNR feedback loop in plasmacytoid dendritic cells. P class oligonucleotides are described at least in U.S. application Ser. No. 11/706,561.

[1321] In some embodiments, immunostimulatory oligonucleotides utilized in accordance with the present invention are S class immunomodulatory oligonucleotides. The immunomodulatory oligonucleotides of the instant invention may be immunosuppressive oligonucleotides. The immunomodulatory motifs described above can be used in the context of previously described classes of immunosuppressive oligonucleotides including ODN classes such as the “S class”. Inhibitory, or S class, ODN are useful whenever it is desirable to inhibit immunostimulation. Inhibitory ODN can be used for preventing and treating septic shock, inflammation, allergy, asthma, graft rejection, graft-versus host disease (GvHD), autoimmune diseases, Th1- or Th2-mediated diseases, bacterial infections, parasitic infections, spontaneous abortions, and tumors. The inhibitory ODN can be used generally to inhibit activation of all cells expressing the relevant TLRs, and more specifically to inhibit activation of antigen-presenting cells, B cells, plasmacytoid dendritic cells (pDCs), monocytes, monocyte-derived cells, eosinophils, and neutrophils. S class ODN are further described at least in U.S. application Ser. No. 10/977,560.

[1322] According to the invention, immunomodulatory oligonucleotides may have a backbone of stabilized internucleotide linkages in addition to the stabilizing FANA purine nucleotide(s) or have a chimeric backbone of stabilized and phosphodiester nucleotide linkages. A “stabilized internucleotide linkage” shall mean an internucleotide linkage that is relatively resistant to in vivo degradation (e.g., via an exo- or endo-nuclease), compared to a phosphodiester internucleotide linkage. In some embodiments, stabilized internucleotide linkages include, without limitation, phosphorothioate, phosphorodithioate, methylphosphonate, methylphosphorothioate, phosphonoacetate, Rp-phosphorothioate, Sp-phosphorothioate, boranophosphate, or 3′-thioformacetal, or combinations thereof. Other stabilized oligonucleotides include: nonionic DNA analogs, such as alkyl- and aryl-phosphates (in which the charged phosphonate oxygen is replaced by an alkyl or aryl group), phosphodiester and alkylphosphotriesters, in which the charged oxygen moiety is alkylated. Oligonucleotides which contain diol, such as tetraethyleneglycol or hexaethyleneglycol, at either or both termini have also been shown to be substantially resistant to nuclease degradation.

[1323] As described in more detained herein, according to the invention, these and other modifications can be selectively introduced at a predetermined position(s)/pattern(s) within an oligonucleotide so as to obtain a stereospecific oligonucleotide molecule. Furthermore, according to the invention, a composition comprising a plurality of such oligonucleotides at an extremely high degree of purity (e.g., at least 96%, at least 97%, at least 98%, at least 99%, essentially 100%) can be obtained. Thus, provided oligonucleotide compositions comprising oligonucleotides of one or more predetermined types are suitable for in vivo administration. It is contemplated that, due to high degree of structural purity of oligonucleotides in a composition (such that a composition comprises a single specified type of oligonucleotides), provided compositions can elicit improved biological activities, increased efficacy, reduced variables in response, and/or reduced unwanted side effects, when administered to subjects.

[1324] Accordingly, utilized oligonucleotides of the invention are particularly useful as an therapeutic agent when formulated into a pharmaceutical composition. In some embodiments, such therapeutic agent is an immunomodulatory agent. In some embodiments, provided immunomodulatory agents are immunostimulatory agents. In some embodiments, provided immunomodulatory agents are immunoinhibitory (or immunosuppressive) agents. In some embodiments, provided immunomodulatory agents act as an adjuvant. In some embodiments, provided immunomodulatory agents can shift a Th2 type immune response to a Th1 type immune response by inducing Th1 type cytokines that can suppress inflammatory Th2 response. In some embodiments, provided oligonucleotide compositions are useful as an agent that regulates gene expression. For example, in some embodiments, provided oligonucleotide compositions are useful as an agent capable of silencing a gene of interest, e.g., genes associated with disease or disorder. In some embodiments, provided oligonucleotide compositions are useful as an agent to regulate RNA splicing.

[1325] For example, some embodiments of such oligonucleotides include those comprising at least one CpG dinucleotide motif. In some embodiments, such oligonucleotides comprise at least one unmethylated CpG dinucleotide motif. In some embodiments, CpG-containing oligonucleotides useful for the present invention are categorized as Class A (type D) oligonucleotides. In some embodiments, CpG-containing oligonucleotides useful for the present invention are categorized as Class B (type K) oligonucleotides. In some embodiments, CpG-containing oligonucleotides useful for the present invention are categorized as Class C oligonucleotides. In some embodiments, CpG-containing oligonucleotides useful for the present invention are categorized as Class P oligonucleotides. In some embodiments, CpG-containing oligonucleotides useful for the present invention contain at least one palindromic sequence. In some embodiments, CpG-containing oligonucleotides useful for the present invention can form a “dumbbell-like” structure. In some embodiments, CpG-containing oligonucleotides useful for the present invention can form a “Y” shaped structure, or multimers thereof. In some embodiments, CpG-containing oligonucleotides useful for the present invention can form a tetrahedral structure. For reviews, see, for example: Bode et al. (2011) Expert Rev. Vaccines 10(4): 499-511; Hanagata (2012) Int. J. Nanomedicine 7:2181-95.

[1326] In some embodiments, oligonucleotides utilized in accordance with the present invention elicit immunomodulatory effects on cells expressing Toll-like receptor(s). In some embodiments, target cells that respond to such oligonucleotides include, but are not limited to, antigen-presenting cells (APCs), antigen-specific T and B cells, cytotoxic T lymphocytes (CTLs), natural killer (NK) cells, and dendritic cells (DCs). In some embodiments, immunomodulatory effects are the direct effects elicited by cells expressing a receptor or receptors that recognize such an oligonucleotide. In some embodiments, such oligonucleotides elicit immunomodulatory effects on cells expressing Toll-like receptor 9 (TLR9) as ligands. For example, some embodiments of the invention include CpG oligonucleotides that act as agonists of one or more Toll-like receptors. Some embodiments of the invention include CpG oligonucleotides that act as antagonists of one or more Toll-like receptors. In some embodiments, immunomodulatory effects are indirect effects that occur downstream, involving cells that do not necessarily respond directly to such oligonucleotides or express such receptors.

[1327] In some embodiments, CpG oligonucleotides useful for the present invention are characterized in that they directly activate human B cells and plasmacytoid dendritic cells via TLR-9. In some embodiments, CpG oligodeoxynucleotides useful for the present invention are characterized in that indirectly support the maturation and proliferation of natural killer cells, T cells and monocytes/macrophages.

[1328] In some embodiments, CpG oligonucleotides useful for the present invention trigger an immune response, which is characterized by the production of Th1-type and proinflammatory cytokines, chemokines and polyreactive IgM.

[1329] In some embodiments, CpG oligonucleotides useful for the present invention are characterized in that the immunogenicity of conventional protein antigens and peptide-based vaccines is enhanced by such oligonucleotides. Without wising to be bound by a particular theory, it is believed that such adjuvant effect is mediated through improved function of professional antigen-presenting cells and the resultant generation of humoral and cellular vaccine-specific immune responses.

[1330] In some embodiments, CpG oligonucleotides useful for the present invention are characterized in that CpG oligonucleotides increase the magnitude and accelerate the development of vaccine induced responses. They also improve the induction of memory, thereby extending the duration of humoral and cellular immunity.

[1331] In some embodiments, CpG oligonucleotides useful for the present invention are characterized in that they boost immunity in groups of subjects (e.g., populations of patients) with reduced immune function, such as the elderly and those with suppressed immune system. They are effective when administered either systemically or mucosally. Preclinical and clinical trials using CpG oligonucleotides of mixed chirality (e.g., not chirally pure) demonstrate CpG oligonucleotides can boost the immunogenicity of vaccines targeting infectious diseases and cancer. Furthermore, clinical trials indicate that CpG oligonucleotides are reasonably safe when administered s vaccine adjuvants.

[1332] Immunomodulatory oligonucleotides prepared in accordance with the present disclosure are useful for a number of therapeutic applications. Therefore, utilized immunomodulatory oligonucleotides may be formulated into suitable pharmaceutical compositions. Such pharmaceutical compostions can be administered to a subject in an amount effective to treat a disease, disorder or condition, as described in further detail herein by suitable routes of administration. According to the invention, an effective amount of an immunostimulatory oligonucleotides may be administered to a subject who is likely to benefit from boosting the immune system (e.g., enhanced immune response). In some embodiments, clinical benefits are conferred directly by an immunomodulatory oligonucleotide acting upon its target immune cells, e.g., via binding of the ligand to its Toll-like receptor proteins. In some embodiments, clinical benefits are achieved at least in part indirectly by overall boosting of the immune system of the subject.

[1333] As used herein, the terms “effective amount” and “effective dose” refer to any amount or dose of a compound or composition that is sufficient to fulfill its intended purpose(s), i.e., a desired biological or medicinal response in a tissue or subject at an acceptable benefit/risk ratio. The relevant intended purpose may be objective (i.e., measurable by some test or marker) or subjective (i.e., subject gives an indication of or feels an effect). In some embodiments, a therapeutically effective amount is an amount that, when administered to a population of subjects that meet certain clinical criteria for a disease or disorder (for example, as determined by symptoms manifested, disease progression/stage, genetic profile, etc.), a statistically significant therapeutic response is obtained among the population. A therapeutically effective amount is commonly administered in a dosing regimen that may comprise multiple unit doses. For any particular pharmaceutical agent, a therapeutically effective amount (and/or an appropriate unit dose within an effective dosing regimen) may vary, for example, depending on route of administration, on combination with other pharmaceutical agents. In some embodiments, the specific therapeutically effective amount (and/or unit dose) for any particular patient may depend upon a variety of factors including the disorder being treated and the severity of the disorder; the activity of the specific pharmaceutical agent employed; the specific composition employed; the age, body weight, general health, sex and diet of the patient; the time of administration, route of administration, and/or rate of excretion or metabolism of the specific pharmaceutical agent employed; the duration of the treatment; and like factors as is well known in the medical arts. Those of ordinary skill in the art will appreciate that in some embodiments of the invention, a unit dosage may be considered to contain an effective amount if it contains an amount appropriate for administration in the context of a dosage regimen correlated with a positive outcome. In some embodiments, CpG oligodeoxynucleotides prepared according to the present invention therefore may exert improved efficacy and immunomodulatory effects due to their chiral purity. In some embodiments, an effective amount of provided immunomodulatory oligonucleotides is less than that of less-pure counterpart.

[1334] In some embodiments, an immunomodulatory oligonucleotide composition is administered to a healthy subject. In some embodiments, an immunostimulatory oligonucleotide composition is administered to a subject as part of a vaccine, in which the immunostimulatory oligonucleotide acts as an adjuvant. In some embodiments, an immunostimulatory oligonucleotide composition is administered to a subject with a suppressed (e.g., compromised) immune system. In some embodiments, a subject, whose immune system is suppressed and does not sufficiently respond to a conventional vaccine, responds to a vaccine comprising an immunostimulatory oligonucleotide embraced by the present invention. In some embodiments, a subject who may benefit from such a vaccine has a suppressed immune system associated with an infection, such as viral infection, e.g., HIV, HBV, HCV, etc.

[1335] The invention encompasses the use of immunomodulatory oligonucleotides contemplated herein for treatment of a subject having a condition that may be treated by stimulation or suppression of the immune response. Thus, provided immunomodulatory oligonucleotide compositions are useful for the treatment of diseases or conditions, including, without limitation, infection, cancer, allergy, asthma, an inflammatory condition, an autoimmune disease, and any combination thereof.

[1336] In some embodiments, provided immunomodulatory oligonucleotide compositions are useful in some aspects of the invention for the treatment of a subject at risk of developing a clinical condition. Non-limiting clinical conditions include allergy, asthma, an infection with an infectious organism, cancer, inflammation, and autoimmune disease. A subject at risk as used herein is a subject who has any risk of exposure to an infection causing pathogen or a cancer or an allergen or a risk of developing cancer. For instance, a subject at risk may be a subject who is planning to travel to an area where a particular type of infectious agent is found, or it may be a subject who through lifestyle or medical procedures is exposed to bodily fluids which may contain infectious organisms or directly to the organism, or even any subject living in an area where an infectious organism or an allergen has been identified. Subjects at risk of developing infection also include general populations to which a medical agency recommends vaccination with a particular infectious organism antigen. If the antigen is an allergen and the subject develops allergic responses to that particular antigen and the subject may be exposed to the antigen, i.e., during pollen season, then that subject is at risk of exposure to the antigen. A subject at risk of developing allergy or asthma includes those subjects that have been identified as having an allergy or asthma but that don't have the active disease during the immunomodulatory oligonucleotide treatment as well as subjects that are considered to be at risk of developing these diseases because of genetic or environmental factors. A subject at risk of developing a cancer is one who has a high probability of developing cancer. These subjects include, for instance, subjects having a genetic abnormality, the presence of which has been demonstrated to have a correlative relation to a higher likelihood of developing a cancer and subjects exposed to cancer causing agents such as tobacco, asbestos, or other chemical toxins, or a subject who has previously been treated for cancer and is in apparent remission. When a subject at risk of developing a cancer is treated with an antigen specific for the type of cancer to which the subject is at risk of developing and a CpG immunostimulatory oligonucleotide, the subject may be able to kill the cancer cells as they develop. If a tumor begins to form in the subject, the subject will develop a specific immune response against the tumor antigen.

[1337] In some embodiments, provided immunomodulatory oligonucleotide compositions are useful for treating a subject having an immune disease or disorder, including asthma, allergy, and related conditions.

[1338] A subject having an allergy is a subject that has or is at risk of developing an allergic reaction in response to an allergen. An allergy refers to acquired hypersensitivity to a substance (allergen). Allergic conditions include but are not limited to eczema, allergic rhinitis or coryza, hay fever, conjunctivitis, bronchial asthma, urticaria (hives) and food allergies, and other atopic conditions.

[1339] Allergies are generally caused by IgE antibody generation against harmless allergens. The cytokines that are induced by systemic or mucosal administration of immunomodulatory oligonucleotides are predominantly of a class called Th1 (examples are IL-12, IP-10, IFN-α and IFN-γ) and these induce both humoral and cellular immune responses. The other major type of immune response, which is associated with the production of IL-4 and IL-5 cytokines, is termed a Th2 immune response. In general, it appears that allergic diseases are mediated by Th2 type immune responses. Based on the ability of the immunomodulatory oligonucleotide to shift the immune response in a subject from a predominant Th2 (which is associated with production of IgE antibodies and allergy) to a balanced Th2/Th1 response (which is protective against allergic reactions), an effective dose for inducing an immune response of a immunomodulatory oligonucleotide can be administered to a subject to treat or prevent asthma and allergy.

[1340] Thus, provided immunomodulatory oligonucleotide compositions have significant therapeutic utility in the treatment of allergic and non-allergic conditions such as asthma. Th2 cytokines, especially IL-4 and IL-5 are elevated in the airways of asthmatic subjects. These cytokines promote important aspects of the asthmatic inflammatory response, including IgE isotope switching, eosinophil chemotaxis and activation and mast cell growth. Th1 cytokines, especially IFN-γ and IL-12, can suppress the formation of Th2 clones and production of Th2 cytokines. Asthma refers to a disorder of the respiratory system characterized by inflammation, narrowing of the airways and increased reactivity of the airways to inhaled agents. Asthma is frequently, although not exclusively associated with atopic or allergic symptoms.

[1341] Provided immunomodulatory oligonucleotide compositions may also be administered in conjunction with an anti-allergy therapy. conventional methods for treating or preventing allergy have involved the use of allergy medicaments or desensitization therapies. Some evolving therapies for treating or preventing allergy include the use of neutralizing anti-IgE antibodies. Anti-histamines and other drugs which block the effects of chemical mediators of the allergic reaction help to regulate the severity of the allergic symptoms but do not prevent the allergic reaction and have no effect on subsequent allergic responses. Desensitization therapies are performed by giving small doses of an allergen, usually by injection under the skin, in order to induce an IgG-type response against the allergen. The presence of IgG antibody helps to neutralize the production of mediators resulting from the induction of IgE antibodies, it is believed. Initially, the subject is treated with a very low dose of the allergen to avoid inducing a severe reaction and the dose is slowly increased. This type of therapy is dangerous because the subject is actually administered the compounds which cause the allergic response and severe allergic reactions can result.

[1342] Anti-allergy medicaments include, but are not limited to, anti-histamines, corticosteroids, and prostaglandin inducers. Anti-histamines are compounds which counteract histamine released by mast cells or basophils. These compounds are well known in the art and commonly used for the treatment of allergy. Anti-histamines include, but are not limited to, acrivastine, astemizole, azatadine, azelastine, betatastine, brompheniramine, buclizine, cetirizine, cetirizine analogues, chlorpheniramine, clemastine, CS 560, cyproheptadine, desloratadine, dexchlorpheniramine, ebastine, epinastine, fexofenadine, HSR 609, hydroxyzine, levocabastine, loratidine, methscopolamine, mizolastine, norastemizole, phenindamine, promethazine, pyrilamine, terfenadine, and tranilast. Corticosteroids include, but are not limited to, methylprednisolone, prednisolone, prednisone, beclomethasone, budesonide, dexamethasone, flunisolide, fluticasone propionate, and triamcinolone. Although dexamethasone is a corticosteroid having antiinflammatory action, it is not regularly used for the treatment of allergy or asthma in an inhaled form because it is highly absorbed and it has long-term suppressive side effects at an effective dose. Dexamethasone, however, can be used according to the invention for treating allergy or asthma because when administered in combination with a composition of the invention it can be administered at a low dose to reduce the side effects. Some of the side effects associated with corticosteroid use include cough, dysphonia, oral thrush (candidiasis), and in higher doses, systemic effects, such as adrenal suppression, glucose intolerance, osteoporosis, aseptic necrosis of bone, cataract formation, growth suppression, hypertension, muscle weakness, skin thinning, and easy bruising. Barnes & Peterson (1993) Am Rev Respir Dis 148:S1-S26; and Kamada A K et al. (1996) Am J Respir Crit Care Med 153:1739-48.

[1343] Provided oligonucleotide compositions and methods in accordance with the invention can be used alone or in conjunction with other agents and methods useful for the treatment of asthma. In one aspect the invention provides a method of treating a subject having asthma. The method according to this aspect of the invention includes the step of administering to a subject having asthma an effective amount of a composition of the invention to treat the subject.

[1344] In some embodiments, the invention provides a method of treating a subject having asthma. The method according to this aspect of the invention includes the step of administering to a subject having asthma an effective amount of the composition of the invention and an anti-asthma therapy to treat the subject.

[1345] “Asthma” as used herein refers to a disorder of the respiratory system characterized by inflammation and narrowing of the airways, and increased reactivity of the airways to inhaled agents. Asthma is frequently, although not exclusively, associated with an atopic or allergic condition. Symptoms of asthma include recurrent episodes of wheezing, breathlessness, chest tightness, and coughing, resulting from airflow obstruction. Airway inflammation associated with asthma can be detected through observation of a number of physiological changes, such as, denudation of airway epithelium, collagen deposition beneath basement membrane, edema, mast cell activation, inflammatory cell infiltration, including neutrophils, eosinophils, and lymphocytes. As a result of the airway inflammation, asthma patients often experience airway hyper-responsiveness, airflow limitation, respiratory symptoms, and disease chronicity. Airflow limitations include acute bronchoconstriction, airway edema, mucous plug formation, and airway remodeling, features which often lead to bronchial obstruction. In some cases of asthma, sub-basement membrane fibrosis may occur, leading to persistent abnormalities in lung function.

[1346] Research over the past several years has revealed that asthma likely results from complex interactions among inflammatory cells, mediators, and other cells and tissues resident in the airways. Mast cells, eosinophils, epithelial cells, macrophage, and activated T cells all play an important role in the inflammatory process associated with asthma. Djukanovic R et al. (1990) Am Rev Respir Dis 142:434-457. It is believed that these cells can influence airway function through secretion of preformed and newly synthesized mediators which can act directly or indirectly on the local tissue. It has also been recognized that subpopulations of T lymphocytes (Th2) play an important role in regulating allergic inflammation in the airway by releasing selective cytokines and establishing disease chronicity. Robinson D S et al. (1992) N Engl J Med 326:298-304.

[1347] Asthma is a complex disorder which arises at different stages in development and can be classified based on the degree of symptoms as acute, subacute, or chronic. An acute inflammatory response is associated with an early recruitment of cells into the airway. The subacute inflammatory response involves the recruitment of cells as well as the activation of resident cells causing a more persistent pattern of inflammation. Chronic inflammatory response is characterized by a persistent level of cell damage and an ongoing repair process, which may result in permanent abnormalities in the airway.

[1348] A “subject having asthma” is a subject that has a disorder of the respiratory system characterized by inflammation and narrowing of the airways and increased reactivity of the airways to inhaled agents. Factors associated with initiation of asthma include, but are not limited to, allergens, cold temperature, exercise, viral infections, and SO₂.

[1349] As mentioned above, asthma may be associated with a Th2-type of immune response, which is characterized at least in part by Th2 cytokines IL-4 and IL-5, as well as antibody isotype switching to IgE. Th1 and Th2 immune responses are mutually counter-regulatory, so that skewing of the immune response toward a Th1-type of immune response can prevent or ameliorate a Th2-type of immune response, including allergy. Provided immunomodulatory oligonucleotide compositions of the invention are therefore useful by themselves to treat a subject having asthma because the analogs can skew the immune response toward a Th1-type of immune response.

[1350] Provided immunomodulatory oligonucleotide compositions of the invention may also be administered in conjunction with an asthma therapy. Conventional methods for treating or preventing asthma have involved the use of anti-allergy therapies (described above) and a number of other agents, including inhaled agents.

[1351] Medications for the treatment of asthma are generally separated into two categories, quick-relief medications and long-term control medications. Asthma patients take the long-term control medications on a daily basis to achieve and maintain control of persistent asthma. Long-term control medications include anti-inflammatory agents such as corticosteroids, chromolyn sodium and nedocromil; long-acting bronchodilators, such as long-acting β₂-agonists and methylxanthines; and leukotriene modifiers. The quick-relief medications include short-acting β₂ agonists, anticholinergics, and systemic corticosteroids. There are many side effects associated with each of these drugs and none of the drugs alone or in combination is capable of preventing or completely treating asthma.

[1352] Anti-asthma medicaments include, but are not limited to, PDE-4 inhibitors, bronchodilator/beta-2 agonists, K+ channel openers, VLA-4 antagonists, neurokin antagonists, thromboxane A2 (TXA2) synthesis inhibitors, xanthines, arachidonic acid antagonists, 5 lipoxygenase inhibitors, TXA2 receptor antagonists, TXA2 antagonists, inhibitor of 5-lipox activation proteins, and protease inhibitors.

[1353] Bronchodilator/β₂ agonists are a class of compounds which cause bronchodilation or smooth muscle relaxation. Bronchodilator/p 2agonists include, but are not limited to, salmeterol, salbutamol, albuterol, terbutaline, D2522/formoterol, fenoterol, bitolterol, pirbuerol methylxanthines and orciprenaline. Long-acting β₂ agonists and bronchodilators are compounds which are used for long-term prevention of symptoms in addition to the anti-inflammatory therapies. Long-acting β₂ agonists include, but are not limited to, salmeterol and albuterol. These compounds are usually used in combination with corticosteroids and generally are not used without any inflammatory therapy. They have been associated with side effects such as tachycardia, skeletal muscle tremor, hypokalemia, and prolongation of QTc interval in overdose.

[1354] Methylxanthines, including for instance theophylline, have been used for long-term control and prevention of symptoms. These compounds cause bronchodilation resulting from phosphodiesterase inhibition and likely adenosine antagonism. Dose-related acute toxicities are a particular problem with these types of compounds. As a result, routine serum concentration must be monitored in order to account for the toxicity and narrow therapeutic range arising from individual differences in metabolic clearance. Side effects include tachycardia, tachyarrhythmias, nausea and vomiting, central nervous system stimulation, headache, seizures, hematemesis, hyperglycemia and hypokalemia. Short-acting β₂ agonists include, but are not limited to, albuterol, bitolterol, pirbuterol, and terbutaline. Some of the adverse effects associated with the administration of short-acting β₂ agonists include tachycardia, skeletal muscle tremor, hypokalemia, increased lactic acid, headache, and hyperglycemia.

[1355] Chromolyn sodium and nedocromil are used as long-term control medications for preventing primarily asthma symptoms arising from exercise or allergic symptoms arising from allergens. These compounds are believed to block early and late reactions to allergens by interfering with chloride channel function. They also stabilize mast cell membranes and inhibit activation and release of mediators from inosineophils and epithelial cells. A four to six week period of administration is generally required to achieve a maximum benefit.

[1356] Anticholinergics are generally used for the relief of acute bronchospasm. These compounds are believed to function by competitive inhibition of muscarinic cholinergic receptors. Anticholinergics include, but are not limited to, ipratropium bromide. These compounds reverse only cholinerigically-mediated bronchospasm and do not modify any reaction to antigen. Side effects include drying of the mouth and respiratory secretions, increased wheezing in some individuals, and blurred vision if sprayed in the eyes.

[1357] In some embodiments, provided immunomodulatory oligonucleotide compositions may also be useful for treating airway remodeling. Airway remodeling results from smooth muscle cell proliferation and/or submucosal thickening in the airways, and ultimately causes narrowing of the airways leading to restricted airflow. The immunomodulatory oligonucleotides of the invention may prevent further remodeling and possibly even reduce tissue build-up resulting from the remodeling process.

[1358] In some embodiments, provided immunomodulatory oligonucleotide compositions are useful for treating a subject having an inflammatory disorder. As used herein, the term “inflammatory disorder” refers to a condition associated with an antigen-nonspecific reaction of the innate immune system that involves accumulation and activation of leukocytes and plasma proteins at a site of infection, toxin exposure, or cell injury. Cytokines that are characteristic of inflammation include tumor necrosis factor (TNF-α), interleukin 1 (IL-1), IL-6, IL-12, interferon alpha (IFN-α), interferon beta (IFN-β), and chemokines. Thus, certain types of asthma, allergy, and autoimmune disorders may have characteristics of an inflammatory disorder. Inflammatory disorders also include, for example cardiovascular disease, chronic obstructive pulmonary disease (COPD), bronchiectasis, chronic cholecystitis, tuberculosis, Hashimoto's thyroiditis, sepsis, sarcoidosis, silicosis and other pneumoconioses, and an implanted foreign body in a wound, but are not so limited. As used herein, the term “sepsis” refers to a well-recognized clinical syndrome associated with a host's systemic inflammatory response to microbial invasion. The term “sepsis” as used herein refers to a condition that is typically signaled by fever or hypothermia, tachycardia, and tachypnea, and in severe instances can progress to hypotension, organ dysfunction, and even death.

[1359] In some embodiments, provided immunomodulatory oligonucleotide compositions are useful for treating a subject having an infection. In some embodiments, provided immunomodulatory oligonucleotide compositions are useful for treating a subject who is susceptible to an infection, including those who may have exposure to a pathogen or pathogens. The immunomodulatory oligonucleotides utilized in accordance with the invention can in some aspects also be used to treat or prevent infections by viruses, bacteria, fungi, or parasites. A subject having an infection is a subject that has been exposed to an infectious pathogen and has acute or chronic detectable levels of the pathogen in the body. The immunomodulatory oligonucleotides can be used with or without an antigen to mount an antigen specific systemic or mucosal immune response that is capable of reducing the level of or eradicating the infectious pathogen. An infectious disease, as used herein, is a disease arising from the presence of a foreign microorganism in the body. It is particularly important to develop effective vaccine strategies and treatments to protect the body's mucosal surfaces, which are the primary site of pathogenic entry.

[1360] Viruses are small infectious agents which generally contain a nucleic acid core and a protein coat, but are not independently living organisms. Viruses can also take the form of infectious nucleic acids lacking a protein. A virus cannot survive in the absence of a living cell within which it can replicate. Viruses enter specific living cells either by endocytosis or direct injection of DNA (phage) and multiply, causing disease. The multiplied virus can then be released and infect additional cells. Some viruses are DNA-containing viruses and others are RNA-containing viruses. DNA viruses include Pox, Herpes, Adeno, Papova, Parvo, and Hepadna. RNA viruses include Picorna, Calici, Astro.Toga, Flavi, Corona, Paramyxo, Orthomyxo, Bunya, Arena, Rhabdo, FiIo, Borna, Reo, and Retro. In some aspects, the invention also intends to treat diseases in which prions are implicated in disease progression such as for example bovine spongiform encephalopathy (i.e., mad cow disease, BSE) or scrapie infection in animals, or Creutzfeldt-Jakob disease in humans.

[1361] Viruses include, but are not limited to, enteroviruses (including, but not limited to, viruses that the family picomaviridae, such as polio virus, Coxsackie virus, echo virus), rotaviruses, adenovirus, and hepatitis virus, such as hepatitis A, B, C D and E. Specific examples of viruses that have been found in humans include but are not limited to: Retroviridae (e.g., human immunodeficiency viruses, such as HIV-1 (also referred to as HTLV-III, LAV or HTLV-III/LAV, or HIV-III; and other isolates, such as HIV-LP; Picomaviridae (e.g., polio viruses, hepatitis A virus; enteroviruses, human Coxsackie viruses, rhinoviruses, echoviruses); Calciviridae (e.g., strains that cause gastroenteritis); Togaviridae (e.g., equine encephalitis viruses, rubella viruses); Flaviviridae (e.g., dengue viruses, encephalitis viruses, yellow fever viruses); Coronaviridae (e.g., coronaviruses); Rhabdoviridae (e.g., vesicular stomatitis viruses, rabies viruses); Filoviridae (e.g., ebola viruses); Paramyxoviridae (e.g., parainfluenza viruses, mumps virus, measles virus, respiratory syncytial virus); Orthomyxoviridae (e.g., influenza viruses); Bunyaviridae (e.g., Hantaan viruses, bunya viruses, phleboviruses and Nairo viruses); Arenaviridae (hemorrhagic fever viruses); Reoviridae (e.g., reoviruses, orbiviurses and rotaviruses); Bimaviridae; Hepadnaviridae (Hepatitis B virus); Parvoviridae (parvoviruses); Papovavihdae (papillomaviruses, polyoma viruses); Adenoviridae (most adenoviruses); Herpesviridae (herpes simplex virus (HSV) 1 and 2, varicella zoster virus, cytomegalovirus (CMV)); Poxviridae (variola viruses, vaccinia viruses, pox viruses); Iridoviridae (e.g., African swine fever virus); and other viruses acute laryngotracheobronchitis virus, Alphavirus, Kaposi's sarcoma-associated herpesvirus, Newcastle disease virus, Nipah virus, Norwalk virus, Papillomavirus, parainfluenza virus, avian influenza, SARs virus, West Nile virus. Viruses that infect plants include, for example, viruses of the genera and/or families of Alfamoviruses: Bromoviridae, Alphacryptoviruses: Partitiviridae, Badnaviruses, Betacryptoviruses: Partitiviridae, Bigeminiviruses: Geminiviridae, Bromoviruses: Bromoviridae, Bymoviruses: Potyviridae, Capilloviruses, Carlaviruses, Carmoviruses: Tombusviridae, Caulimoviruses, Closteroviruses, Comoviruses: Comoviridae, Cucumoviruses: Bromoviridae, Cytorhabdoviruses: Rhabdoviridae, Dianthoviruses, Enamoviruses, Fabaviruses: Comoviridae, Fijiviruses: Reoviridae, Furoviruses, Hordeiviruses, Hybrigeminiviruses: Geminiviridae, Idaeoviruses, Ilarviruses: Bromoviridae, Ipomoviruses: Potyviridae, Luteoviruses, Machlomoviruses, Macluraviruses, Marafiviruses, Monogeminiviruses: Geminiviridae, Nanaviruses, Necroviruses, Nepoviruses: Comoviridae, Nucleorhabdoviruses: Rhabdoviridae, Oryzaviruses: Reoviridae, Ourmiaviruses, Phytoreoviruses: Reoviridae, Potexviruses, Potyviruses: Potyviridae, Rymoviruses: Potyviridae, Satellite RNAs, Satelliviruses, Sequiviruses: Sequiviridae, Sobemoviruses, Tenuiviruses, Tobamoviruses, Tobraviruses, Tombusviruses: Tombusviridae, Tospoviruses: Bunyaviridae, Trichoviruses, Tymoviruses, Umbraviruses, Unassigned potyviruses: Potyviridae, Unassigned rhabdoviruses: Rhabdoviridae, Varicosaviruses, Waikaviruses: Sequiviridae, Ungrouped viruses, Bromoviridae Potyviridae and Tymoviridae; particular relevant plant viruses invclude, for example, Tobacco mosaic virus (TMV), Tomato spotted wilt virus, Tomato yellow leaf curl virus, Cucumber mosaic virus, Potato virus Y, Cauliflower mosaic virus, African cassava mosaic virus, Plum pox virus, Brome mosaic virus, Potato virus X, Citrus tristeza virus, Barley yellow dwarf virus, Potato leafroll virus and Tomato bushy stunt virus.

[1362] Viral hepatitis is an inflammation of the liver which may produce swelling, tenderness, and sometimes permanent damage to the liver. If the inflammation of the liver continues at least six months or longer, it is referred to as chronic hepatitis. There are at least five different viruses known to cause viral hepatitis, include hepatitis A i B, C D and E. Hepatitis A is generally communicated through food or drinking water contaminated with human feces. Hepatitis B generally is spread through bodily fluids such as blood. For instance, it may be spread from mother to child at birth, through sexual contact, contaminated blood transfusions and needles. Hepatitis C is quite common and like Hepatitis B is often spread through blood transfusions and contaminated needles. Hepatitis D is found most often in IV drug users who are carriers of the hepatitis B virus with which it co-associates. Hepatitis E is similar to viral hepatitis A and is generally associated with poor sanitation.

[1363] Both gram negative and gram positive bacteria serve as antigens in vertebrate animals. Such gram positive bacteria include, but are not limited to, Pasteurella species, Staphylococci species, and Streptococcus species. Gram negative bacteria include, but are not limited to, Escherichia coli, Pseudomonas species, and Salmonella species. Specific examples of infectious bacteria include but are not limited to, Helicobacter pyloris, Borelia burgdorferi, Legionella pneumophilia, Mycobacteria sps (e.g. M. tuberculosis, M. avium, M. intracellular, M. kansaii, M. gordonae), Staphylococcus aureus, Neisseria gonorrhoeae, Neisseria meningitidis, Listeria monocytogenes, Streptococcus pyogenes (Group A Streptococcus), Streptococcus agalactiae (Group B Streptococcus), Streptococcus (viridans group), Streptococcus faecalis, Streptococcus bovis, Streptococcus (anaerobic sps.), Streptococcus pneumoniae, pathogenic Campylobacter sp., Enterococcus sp., Haemophilus influenzae, Bacillus antracis, Corynebacterium diphtheriae, Corynebacterium sp., Erysipelothrix rhusiopathiae, Clostridium pen ‘ringers, Clostridium tetani, Enterobacter aerogenes, Klebsiella pneumoniae, Pasteurella multocida, Bacteroides sp., Fusobacterium nucleatum, Streptobacillus moniliformis, Treponema pallidium, Treponema pertenue, Leptospira, Rickettsia, and Actinomyces israelii.

[1364] Examples of fungi include Cryptococcus neoformans, Histoplasma capsulatum, Coccidioides immitis, Blastomyces dermatitidis, Chlamydia trachomatis, Candida albicans.

[1365] Other infectious organisms (i.e., protists) include Plasmodium spp. such as Plasmodium falciparum, Plasmodium malariae, Plasmodium ovale, and Plasmodium vivax and Toxoplasma gondii. Blood-borne and/or tissues parasites include Plasmodium spp., Babesia microti, Babesia divergens, Leishmania tropica, Leishmania spp., Leishmania braziliensis, Leishmania donovani, Trypanosoma gambiense and Trypanosoma rhodesiense (African sleeping sickness), Trypanosoma cruzi (Chagas' disease), and Toxoplasma gondii.

[1366] Other medically relevant microorganisms have been described extensively in the literature, e.g., see C. G. A Thomas, Medical Microbiology, Bailliere Tindall, Great Britain 1983, the entire contents of which is hereby incorporated by reference. Agriculturally relevant microorganisms (e.g., those that infect crops and/or livestock) are also known, for example but not limited to those described in, e.g., George N. Agrios, Plant Pathology, Elsevier Academic Press, 5^{th} Edition, 2005; John Lucas, Plant Pathology and Plant Pathogens, Wiley-Blackwell; 3^{rd} edition, 1998; Dwight C. Hirsh, N. James MacLachlan, Richard L. Walker, Veterinary Microbiology, Wiley-Blackwell; 2 edition, 2004; and P. J. Quinn, et al, Veterinary Microbiology and Microbial Disease, Wiley-Blackwell; 2 edition, 2011.

[1367] Provided oligonucleotide compositions of the invention may be administered to a subject (including, for example, a human subject or, in some embodiments an animal [e.g., livestock or pet animal] or plant [e.g., crop] subject) with an anti-microbial agent. An anti-microbial agent, as used herein, refers to a naturally-occurring or synthetic compound which is capable of killing or inhibiting infectious microorganisms. The type of anti-microbial agent useful according to the invention will depend upon the type of microorganism with which the subject is infected or at risk of becoming infected. Anti-microbial agents include but are not limited to anti-bacterial agents, anti-viral agents, anti-fungal agents and anti-parasitic agents. Phrases such as “anti-infective agent”, “anti-bacterial agent”, “anti-viral agent”, “anti-fungal agent”, “antiparasitic agent” and “parasiticide” have well-established meanings to those of ordinary skill in the art and are defined in standard medical texts. Briefly, anti-bacterial agents kill or inhibit bacteria, and include antibiotics as well as other synthetic or natural compounds having similar functions. Antibiotics are low molecular weight molecules which are produced as secondary metabolites by cells, such as microorganisms. In general, antibiotics interfere with one or more bacterial functions or structures which are specific for the microorganism and which are not present in host cells. Anti-viral agents can be isolated from natural sources or synthesized and are useful for killing or inhibiting viruses. Anti-fungal agents are used to treat superficial fungal infections as well as opportunistic and primary systemic fungal infections. Anti-parasite agents kill or inhibit parasites.

[1368] Examples of anti-parasitic agents, also referred to as parasiticides useful for human administration include but are not limited to albendazole, amphotericin B, benznidazole, bithionol, chloroquine HCI, chloroquine phosphate, clindamycin, dehydroemetine, diethylcarbamazine, diloxanide furoate, eflornithine, furazolidaone, glucocorticoids, halofantrine, iodoquinol, ivermectin, mebendazole, mefloquine, meglumine antimoniate, melarsoprol, metrifonate, metronidazole, niclosamide, nifurtimox, oxamniquine, paromomycin, pentamidine isethionate, piperazine, praziquantel, primaquine phosphate, proguanil, pyrantel pamoate, pyrimethanmine-sulfonamides, pyrimethanmine-sulfadoxine, quinacrine HCI, quinine sulfate, quinidine gluconate, spiramycin, stibogluconate sodium (sodium antimony gluconate), suramin, tetracycline, doxycycline, thiabendazole, tinidazole, trimethroprim-sulfamethoxazole, and tryparsamide some of which are used alone or in combination with others.

[1369] Antibacterial agents kill or inhibit the growth or function of bacteria. A large class of antibacterial agents is antibiotics. Antibiotics, which are effective for killing or inhibiting a wide range of bacteria, are referred to as broad spectrum antibiotics. Other types of antibiotics are predominantly effective against the bacteria of the class gram-positive or gram-negative. These types of antibiotics are referred to as narrow spectrum antibiotics. Other antibiotics which are effective against a single organism or disease and not against other types of bacteria, are referred to as limited spectrum antibiotics. Antibacterial agents are sometimes classified based on their primary mode of action. In general, antibacterial agents are cell wall synthesis inhibitors, cell membrane inhibitors, protein synthesis inhibitors, nucleic acid synthesis or functional inhibitors, and competitive inhibitors.

[1370] Antiviral agents are compounds which prevent infection of cells by viruses or replication of the virus within the cell. There are many fewer antiviral drugs than antibacterial drugs because the process of viral replication is so closely related to DNA replication within the host cell, that non-specific antiviral agents would often be toxic to the host. There are several stages within the process of viral infection which can be blocked or inhibited by antiviral agents. These stages include, attachment of the virus to the host cell (immunoglobulin or binding peptides), uncoating of the virus (e.g. amantadine), synthesis or translation of viral mRNA (e.g. interferon), replication of viral RNA or DNA (e.g. nucleotide analogues), maturation of new virus proteins (e.g. protease inhibitors), and budding and release of the virus.

[1371] Nucleotide analogues are synthetic compounds which are similar to nucleotides, but which have an incomplete or abnormal deoxyribose or ribose group. Once the nucleotide analogues are in the cell, they are phosphorylated, producing the triphosphate formed which competes with normal nucleotides for incorporation into the viral DNA or RNA. Once the triphosphate form of the nucleotide analogue is incorporated into the growing nucleic acid chain, it causes irreversible association with the viral polymerase and thus chain termination. Nucleotide analogues include, but are not limited to, acyclovir (used for the treatment of herpes simplex virus and varicella-zoster virus), gancyclovir (useful for the treatment of cytomegalovirus), idoxuridine, ribavirin (useful for the treatment of respiratory syncitial virus), dideoxyinosine, dideoxycytidine, zidovudine (azidothymidine), imiquimod, and resimiquimod.

[1372] The interferons are cytokines which are secreted by virus-infected cells as well as immune cells. The interferons function by binding to specific receptors on cells adjacent to the infected cells, causing the change in the cell which protects it from infection by the virus, a and β-interferon also induce the expression of Class I and Class II MHC molecules on the surface of infected cells, resulting in increased antigen presentation for host immune cell recognition, a and β-interferons are available as recombinant forms and have been used for the treatment of chronic hepatitis B and C infection. At the dosages which are effective for anti-viral therapy, interferons have severe side effects such as fever, malaise and weight loss.

[1373] Anti-viral agents useful in the invention include but are not limited to immunoglobulins, amantadine, interferons, nucleotide analogues, and protease inhibitors. Specific examples of anti-virals include but are not limited to Acemannan; Acyclovir; Acyclovir Sodium; Adefovir; Alovudine; Alvircept Sudotox; Amantadine Hydrochloride; Aranotin; Arildone; Atevirdine Mesylate; Avridine; Cidofovir; Cipamfylline; Cytarabine Hydrochloride; Delavirdine Mesylate; Desciclovir; Didanosine; Disoxaril; Edoxudine; Enviradene; Enviroxime; Famciclovir; Famotine Hydrochloride; Fiacitabine; Fialuridine; Fosarilate; Foscarnet Sodium; Fosfonet Sodium; Ganciclovir; Ganciclovir Sodium; Idoxuridine; Kethoxal; Lamivudine; Lobucavir; Memotine Hydrochloride; Methisazone; Nevirapine; Penciclovir; Pirodavir; Ribavirin; Rimantadine Hydrochloride; Saquinavir Mesylate; Somantadine Hydrochloride; Sorivudine; Statolon; Stavudine; Tilorone Hydrochloride; Trifluridine; Valacyclovir Hydrochloride; Vidarabine; Vidarabine Phosphate; Vidarabine Sodium Phosphate; Viroxime; Zalcitabine; Zidovudine; and Zinviroxime.

[1374] Anti-fungal agents are useful for the treatment and prevention of infective fungi. Anti-fungal agents are sometimes classified by their mechanism of action. Some antifungal agents function as cell wall inhibitors by inhibiting glucose synthase. These

[1375] include, but are not limited to, basiungin/ECB. Other anti-fungal agents function by destabilizing membrane integrity. These include, but are not limited to, immidazoles, such as clotrimazole, sertaconzole, fluconazole, itraconazole, ketoconazole, miconazole, and voriconacole, as well as FK 463, amphotericin B, BAY 38-9502, MK 991, pradimicin, UK 292, butenafine, and terbinafine. Other anti-fungal agents function by breaking down chitin (e.g. chitinase) or immunosuppression (501 cream).

[1376] In some embodiments, provided immunomodulatory oligonucleotide compositions are useful for treating a subject having a cell proliferative disease, such as cancer. A subject having a cancer is a subject that has detectable cancerous cells. The cancer may be a malignant or non-malignant cancer. Cancers or tumors include but are not limited to biliary tract cancer; brain cancer; breast cancer; cervical cancer; choriocarcinoma; colon cancer; endometrial cancer; esophageal cancer; gastric cancer; intraepithelial neoplasms; lymphomas; liver cancer; lung cancer (e.g. small cell and non-small cell); melanoma; neuroblastomas; oral cancer; ovarian cancer; pancreas cancer; prostate cancer; rectal cancer; sarcomas; skin cancer; testicular cancer; thyroid cancer; and renal cancer, as well as other carcinomas and sarcomas. In one embodiment the cancer is hairy cell leukemia, chronic myelogenous leukemia, cutaneous T-cell leukemia, multiple myeloma, follicular lymphoma, malignant melanoma, squamous cell carcinoma, renal cell carcinoma, prostate carcinoma, bladder cell carcinoma, or colon carcinoma.

[1377] Provided immunomodulatory oligonucleotide compositions may be administered alone or in conjunction with an anti-cancer therapy. Anti-cancer therapies include but are not limited to radiation therapy, chemotherapy, immunotherapy, a cancer vaccine, hormone therapy, a biological response modifier, and surgical procedures. A cancer medicament refers to an agent which is administered to a subject for the purpose of treating a cancer. As used herein, “treating cancer” includes preventing the development of a cancer, reducing the symptoms of cancer, and/or inhibiting the growth of an established cancer. In other aspects, the cancer medicament is administered to a subject at risk of developing a cancer for the purpose of reducing the risk of developing the cancer. Various types of medicaments for the treatment of cancer are described herein. For the purpose of this specification, cancer medicaments are classified as chemotherapeutic agents, immunotherapeutic agents, cancer vaccines, hormone therapy, and biological response modifiers.

[1378] Additionally, the methods of the invention are intended to embrace the use of more than one cancer medicament along with provided immunomodulatory oligonucleotide compositions. As an example, where appropriate, provided immunomodulatory oligonucleotide compositions may be administered with both a chemotherapeutic agent and an immunotherapeutic agent. Alternatively, the cancer medicament may embrace an immunotherapeutic agent and a cancer vaccine, or a chemotherapeutic agent and a cancer vaccine, or a chemotherapeutic agent, an immunotherapeutic agent and a cancer vaccine all administered to one subject for the purpose of treating a subject having a cancer or at risk of developing a cancer.

[1379] Chemotherapeutic agent may be selected from the group consisting of methotrexate, vincristine, adriamycin, cisplatin, non-sugar containing chloroethylnitrosoureas, 5-fluorouracil, mitomycin C, bleomycin, doxorubicin, dacarbazine, taxol, fragyline, Meglamine GLA, valrubicin, carmustaine and poliferposan, MMI270, BAY 12-9566, RAS famesyl transferase inhibitor, famesyl transferase inhibitor, MMP, MTA/LY231514, LY264618/Lometexol, Glamolec, CI-994, TNP-470, Hycamtin/Topotecan, PKC412, Valspodar/PSC833, Novantrone/Mitroxantrone, Metaret/Suramin, Batimastat, E7070, BCH-4556, CS-682, 9-AC, AG3340, AG3433, lncel/VX-710, VX-853, ZD0101, ISI641, ODN 698, TA 2516/Marmistat, BB2516/Marmistat, CDP 845, D2163, PD183805, DX8951f, Lemonal DP 2202, FK 317, Picibanil/OK-432, AD 32/Valrubicin, Metastron/strontium derivative, Temodal/Temozolomide, Evacet/liposomal doxorubicin, Yewtaxan/Paclitaxel, Taxol/Paclitaxel, Xeload/Capecitabine, Furtulon/Doxifluridine, Cyclopax/oral paclitaxel, Oral Taxoid, SPU-077/Cisplatin, HMR 1275/Flavopiridol, CP-358 (774)/EGFR, CP-609 (754)/RAS oncogene inhibitor, BMS-182751/oral platinum, UFT (Tegafur/Uracil), Ergamisol/Levamisole, Eniluracil/776C85/5FU enhancer, Campto/Levamisole, Camptosar/hrinotecan, Tumodex/Ralitrexed, Leustatin/Cladribine, Paxex/Paclitaxel, Doxil/liposomal doxorubicin, Caelyx/liposomal doxorubicin, Fludara/Fludarabine, Pharmarubicin/Epirubicin, DepoCyt, ZD1839, LU 79553/Bis-Naphtalimide, LU 103793/Dolastain, Caetyx/liposomal doxorubicin, Gemzar/Gemcitabine, ZD 0473/Anormed, YM 116, Iodine seeds, CDK4 and CDK2 inhibitors, PARP inhibitors, D4809/Dexifosamide, Ifes/Mesnex/lfosamide, Vumon/Teniposide, Paraplatin/Carboplatin, Plantinol/cisplatin, Vepeside/Etoposide, ZD 9331, Taxotere/Docetaxel, prodrug of guanine arabinoside, Taxane Analog, nitrosoureas, alkylating agents such as melphelan and cyclophosphamide, Aminoglutethimide, Asparaginase, Busulfan, Carboplatin, Chlorambucil, Cytarabine HCI, Dactinomycin, Daunorubicin HCI, Estramustine phosphate sodium, Etoposide (VP16-213), Floxuridine, Fluorouracil (5-FU), Flutamide, Hydroxyurea (hydroxycarbamide), Ifosfamide, Interferon Alfa-2a, Alfa-2b, Leuprolide acetate (LHRH-releasing factor analogue), Lomustine (CCNU), Mechlorethamine HCI (nitrogen mustard), Mercaptopurine, Mesna, Mitotane (o.p′-DDD), Mitoxantrone HCI, Octreotide, Plicamycin, Procarbazine HCI, Streptozocin,

[1380] Tamoxifen citrate, Thioguanine, Thiotepa, Vinblastine sulfate, Amsacrine (m-AMSA), Azacitidine, Erthropoietin, Hexamethylmelamine (HMM), interleukin 2, Mitoguazone (methyl-GAG; methyl glyoxal bis-guanylhydrazone; MGBG), Pentostatin (2′deoxycoformycin), Semustine (methyl-CCNU), Teniposide (VM-26) and Vindesine sulfate, but it is not so limited.

[1381] Immunotherapeutic agent may be selected from the group consisting of Ributaxin, Herceptin, Quadramet, Panorex, IDEC-Y2B8, BEC2, C225, Oncolym, SMART M195, ATRAGEN, Ovarex, Bexxar, LDP-03, ior tβ, MDX-210, MDX-11, MDX-22, OV103, 3622W94, anti-VEGF, Zenapax, MDX-220, MDX-447, MELIMMUNE-2, MELIMMUNE-1, CEACIDE, Pretarget, NovoMAb-G2, TNT, Gliomab-H, GNI-250, EMD-72000, LymphoCide, CMA 676, Monopharm-C, 4B5, ior egf.r3, ior c5, BABS, anti-FLK-2, MDX-260, ANA Ab, SMART 1 D10 Ab, SMART ABL 364 Ab and ImmuRAIT-CEA, but it is not so limited.

[1382] Cancer vaccine may be selected from the group consisting of EGF, Anti-idiotypic cancer vaccines, Gp75 antigen, GMK melanoma vaccine, MGV ganglioside conjugate vaccine, Her2/neu, Ovarex, M-Vax, O-Vax, L-Vax, STn-KHL theratope, BLP25 (MUC-1), liposomal idiotypic vaccine, Melacine, peptide antigen vaccines, toxin/antigen vaccines, MVA-based vaccine, PACIS, BCG vacine, TA-HPV, TA-CIN, DISC-virus and ImmuCyst/TheraCys, but it is not so limited.

[1383] As used herein, the terms “cancer antigen” and “tumor antigen” are used interchangeably to refer to antigens which are differentially expressed by cancer cells and can thereby be exploited in order to target cancer cells. Cancer antigens are antigens which can potentially stimulate apparently tumor-specific immune responses. Some of these antigens are encoded, although not necessarily expressed, by normal cells. These antigens can be characterized as those which are normally silent (i.e., not expressed) in normal cells, those that are expressed only at certain stages of differentiation and those that are temporally expressed such as embryonic and fetal antigens. Other cancer antigens are encoded by mutant cellular genes, such as oncogenes (e.g., activated ras oncogene), suppressor genes (e.g., mutant p53), fusion proteins resulting from internal deletions or chromosomal translocations. Still other cancer antigens can be encoded by viral genes such as those carried on RNA and DNA tumor viruses.

[1384] In some embodiments, provided immunomodulatory oligonucleotide compositions may also be useful for treating and preventing autoimmune disease. Autoimmune disease is a class of diseases in which a subject's own antibodies react with host tissue or in which immune effector T cells are autoreactive to endogenous self peptides and cause destruction of tissue. Thus an immune response is mounted against a subject's own antigens, referred to as self antigens. Autoimmune diseases include but are not limited to alopecia areata, acquired hemophilia, ankylosing spondylitis, antiphospholipid syndrome, autoimmune-associated infertility, autoimmune encephalomyelitis, autoimmune hepatitis, autoimmune hemolytic anemia, autoimmune diabetes mellitus, autoimmune thrombocytopenic purpura, Behget's syndrome, bullous pemphigoid, cardiomyopathy, chronic fatigue immune dysfunction syndrome (CFIDS), chronic inflammatory demyelinating polyneuropathy, Churg-Strauss syndrome, cicatricial pemphigoid, CREST syndrome, cold agglutinin disease, dermatomyositis, discoid lupus, essential mixed cryoglobulinemia, fibromyalgia, fibromyositis, Guillain-Barre syndrome, Hashimoto's thyroiditis, glomerulonephritis (e.g., crescentic glomerulonephritis, proliferative glomerulonephritis), Grave's disease, graft versus host disease, Goodpasture's syndrome, pemphigus (e.g., pemphigus vulgaris), idiopathic pulmonary fibrosis, idiopathic thrombocytopenic purpura, insulin resistance, idiopathic Addison's disease, IgA nephropathy, inflammatory bowel disease (including Crohn's disease and ulcerative colitis), juvenile arthritis, lichen planus, myasthenia gravis, multiple sclerosis, mixed connective tissue disease, polymyositis, pernicious anemia, polyarteritis nodosa, polychondritis, polyglandular syndromes, polymyalgia rheumatica, primary agammaglobulinemia, primary biliary cirrhosis, psoriasis, Raynaud's phenomena, Reite\hat{ }s syndrome, juvenile and adult rheumatoid arthritis, Sjorgen's syndrome, scleroderma with anti-collagen antibodies, sarcoidosis, stiff-man syndrome, systemic lupus erythematosus (SLE), Takayasu arthritis, transplanted organ rejection, temporal arteritis/giant cell arteritis, uveitis, ulcerative colitis, vasculitis, and vitiligo.

[1385] A “self-antigen” as used herein refers to an antigen of a normal host tissue. Normal host tissue does not include cancer cells. Thus an immune response mounted against a self-antigen, in the context of an autoimmune disease, is an undesirable immune response and contributes to destruction and damage of normal tissue, whereas an immune response mounted against a cancer antigen is a desirable immune response and contributes to the destruction of the tumor or cancer. Thus, in some aspects of the invention aimed at treating autoimmune disorders it is not recommended that the immunomodulatory oligonucleotides be administered with self antigens, particularly those that are the targets of the autoimmune disorder.

[1386] In other instances, immunomodulatory oligonucleotides used in according to the present invention may be delivered with low doses of self-antigens. A number of animal studies have demonstrated that mucosal administration of low doses of antigen can result in a state of immune hyporesponsiveness or “tolerance.” The active mechanism appears to be a cytokine-mediated immune deviation away from a Th1 towards a predominantly Th2 and Th3 (i.e., TGF-β dominated) response. The active suppression with low dose antigen delivery can also suppress an unrelated immune response (bystander suppression) which is of considerable interest in the therapy of autoimmune diseases, for example, rheumatoid arthritis and SLE. Bystander suppression involves the secretion of Th1-counter-regulatory, suppressor cytokines in the local environment where proinflammatory and Th1 cytokines are released in either an antigen-specific or antigen-nonspecific manner. ‘Tolerance” as used herein is used to refer to this phenomenon. Indeed, oral tolerance has been effective in the treatment of a number of autoimmune diseases in animals including: experimental autoimmune encephalomyelitis (EAE), experimental autoimmune myasthenia gravis, collagen-induced arthritis (CIA), and insulin-dependent diabetes mellitus. In these models, the prevention and suppression of autoimmune disease is associated with a shift in antigen-specific humoral and cellular responses from a Th1 to Th2/Th3 response

[1387] Non-limiting examples of useful immunomodulatory oligonucleotides that can be utilized in accordance with the present invention are provided in the accompanying Appendix (B).

### RIPtides

[1388] In some embodiments, oligonucleotides utilized in accordance with the present invention are or act as RNA-interacting polynucleotides (“RIPtides”). RIPtides are a class of therapeutics intended to open up the space of “undruggable” targets by inactivating structural RNAs implicated in disease. RIPtides are typically small nucleotide stretches (around 8 nucleotides) that bind and disrupt the action of structured RNA. Due to their size, these molecules can readily pass through the cell membrane. See, for example, U.S. Pat. No. 6,080,585.

[1389] RIPtides may be useful for a number of clinical applications. In the context of cancer therapy, at least one target is telomerase, which is present in about 90% of cancer cells. Therefore, in some embodiments, stereo-defined oligonucleotides of the invention can be used to target telomerase for the treatment of various cancer. In addition, RIPtides may be useful for the treatment of infectious disease. Viruses, such as HIV and Hepatitis C, must be able to take over a host cell in order to replicate; therefore, structural RNA can play an important role in the maturation and replication of many viruses. Accordingly, in some embodiments, stereo-defined oligonucleotides of the invention can be used to target portions of DNA or RNA involved in viral maturation and/or replication.

[1390] Thus, the invention is useful for treating various viral infections. Viruses include, but are not limited to, enteroviruses (including, but not limited to, viruses that the family picomaviridae, such as polio virus, Coxsackie virus, echo virus), rotaviruses, adenovirus, and hepatitis virus, such as hepatitis A, B, C D and E. Specific examples of viruses that have been found in humans include but are not limited to: Retroviridae (e.g., human immunodeficiency viruses, such as HIV-1 (also referred to as HTLV-III, LAV or HTLV-III/LAV, or HIV-III; and other isolates, such as HIV-LP; Picornaviridae (e.g., polio viruses, hepatitis A virus; enteroviruses, human Coxsackie viruses, rhinoviruses, echoviruses); Calciviridae (e.g., strains that cause gastroenteritis); Togaviridae (e.g., equine encephalitis viruses, rubella viruses); Flaviviridae (e.g., dengue viruses, encephalitis viruses, yellow fever viruses); Coronaviridae (e.g., coronaviruses); Rhabdoviridae (e.g., vesicular stomatitis viruses, rabies viruses); Filoviridae (e.g., ebola viruses); Paramyxoviridae (e.g., parainfluenza viruses, mumps virus, measles virus, respiratory syncytial virus); Orthomyxoviridae (e.g., influenza viruses); Bunyaviridae (e.g., Hantaan viruses, bunya viruses, phleboviruses and Nairo viruses); Arenaviridae (hemorrhagic fever viruses); Reoviridae (e.g., reoviruses, orbiviurses and rotaviruses); Birnaviridae; Hepadnaviridae (Hepatitis B virus); Parvoviridae (parvoviruses); Papovavihdae (papillomaviruses, polyoma viruses); Adenoviridae (most adenoviruses); Herpesviridae (herpes simplex virus (HSV) 1 and 2, varicella zoster virus, cytomegalovirus (CMV)); Poxviridae (variola viruses, vaccinia viruses, pox viruses); Iridoviridae (e.g., African swine fever virus); and other viruses acute laryngotracheobronchitis virus, Alphavirus, Kaposi's sarcoma-associated herpesvirus, Newcastle disease virus, Nipah virus, Norwalk virus, Papillomavirus, parainfluenza virus, avian influenza, SARs virus, West Nile virus.

### Antisense Drugs

[1391] The present invention also encompasses a variety of antisense-based therapeutics. Typically, antisense drugs are small (12-21 nucleotides) DNA- or RNA-like compounds that are chemically modified to engineer favorable drug properties. Some of the antisense agents available in the art include phosphorothioate or deoxyoligonucleotides, and in this situation a sulfur group is exchanged for a nonbridging oxygen on the phosphate backbone. This increases the resistance to RNase degradation and improves the pharmacologic stability. Yet in other agents, so-called “the next generation of antisense molecules,” the oligonucleotides the 2′-O-methoxyethyl modification to the backbone, which can increase the affinity for these oligonucleotides for the target RNA. However, in some cases, many of these agents are associated with side effects, such as unwanted immune responses. At least in some situations, such undesirable properties of these agents are attributable at least in part to their stereorandom nature. The present invention provides stereodefined counterpart having preferred properties, such as improved lipophilicity and increased RNA binding.

[1392] A number of antisense-based therapeutics have been developed or in development. Non-limiting examples of antisense therapies are provided below. Stereo-defined (e.g., chirally pure) oligonucleotides as described herein can be prepared for achieving improved efficacy, increased affinity to target, reduced side effects, improved pharmacokinetics, enhanced stability and/or increased bioavailability, relative to the antisense drugs currently available in the art. In some embodiments, antisense therapeutics include Morpholino drugs. See, for example: Morcos, PA (2007). “Achieving targeted and quantifiable alteration of mRNA splicing with Morpholino oligos”. Biochem Biophys Res Commun 358 (2): 521-7.

[1393] Cytomegalovirus retinitis: Fomivirsen (marketed as Vitravene), was approved by the U.S. FDA in August 1998 as a treatment for cytomegalovirus retinitis.

[1394] Hemorrhagic fever viruses: In early 2006, scientists studying the Ebola hemorrhagic fever virus at USAMRIID announced a 75% recovery rate after infecting four rhesus monkeys and then treating them with an antisense Morpholino drug developed by AVI BioPharma, a U.S. biotechnology firm. [U.S. Army Medical Research Institute of Infectious Diseases, Fort Detrick, Maryland. News Release: Gene-Specific Ebola Therapies Protect Nonhuman Primates from Lethal Disease. Jan. 13, 20061 The usual mortality rate for monkeys infected with Ebola virus is 100%. In late 2008, AVI BioPharma successfully filed Investigational New Drug (IND) applications with the FDA for its two lead products for Marburg and Ebola viruses. These drugs, AVI-6002 (Lu, X; Yu, Q; Binder, GK; Chen, Z; Slepushkina, T; Rossi, J; Dropulic, B (2004). “Antisense-Mediated Inhibition of Human Immunodeficiency Virus (HIV) Replication by Use of an HIV Type 1-Based Vector Results in Severely Attenuated Mutants Incapable of Developing Resistance”. Journal of Virology 78 (13): 7079-88) and AVI-6003 are novel analogs based on AVI's PMO antisense chemistry in which anti-viral potency is enhanced by the addition of positively-charged components to the morpholino oligomer chain. Preclinical results of AVI-6002 and AVI-6003 demonstrated reproducible and high rates of survival in non-human primates challenged with a lethal infection of the Ebola and Marburg viruses, respectively (Medical News Today. AVI BioPharma Announces FDA Clears IND Applications For Clinical Trials Of RNA Therapeutic Agents For Treatment Of Ebola And Marburg Viruses. 30 Dec. 2008).

[1395] Cancer: Also in 2006, German physicians reported on a dose-escalation study for the compound AP 12009 (a phosphorothioate antisense oligodeoxynucleotide specific for the mRNA of human transforming growth factor TGF-beta2) in patients with high grade gliomas. At the time of the report, the median overall survival had not been obtained and the authors hinted at a potential cure (Results of G004, a phase IIb actively controlled clinical trial with the TGF-b2 targeted compound AP 12009 for recurrent anaplastic astrocytoma—Hau et al. 24 (18 Supplement): 1566—ASCO Meeting Abstracts).

[1396] For example, trabedersen (AP 12009-P001) is developed as monotherapy for the treatment of patients with advanced pancreatic cancer, malignant melanoma, brain tumors, anaplastic astrocytoma, and colorectal carcinoma. AP 12009-P001 has been evaluated in an open-label, multicenter, Phase I/II dose escalation trial to evaluate safety and tolerability of i.v. administration of trabedersen in 61 patients with advanced solid tumors known to overproduce TGF-b2, who were either not or no longer amenable to established forms of therapies.

[1397] Other examples of antisense drugs that target proteins overexpressed in cancers include: Clusterin (OGX-011/TV01011), which regulates epithelial-mesenchymal transition induced by the growth factor TGF beta and the transcription factor TWIST1 in prostate cancer cells; ATL 1101 (a second generation antisense inhibitor of the insulin-like growth factor-I receptor (IGF-IR)) in prostate cancer treatment; oblimersen (trade name: Genasense) for treating chronic lymphocytic leukemia; G4460 and LR3001 (inhibitors of c-myb) for the treatment of CML, melanoma, neuroblastoma, and cancers of the breast, pancreas and colon; MG98 (inhibitor of DNA methyltransferase I) for the treatment of renal cell carcinoma; ISIS 5132 (c-Raf antisense); LY900003 (Protein kinase C-alpha antisense); G3139 (Bcl-2 antisense), etc.

[1398] HIV/AIDS: Starting in 2004, researchers in the US have been conducting research on using antisense technology to combat HIV. It is known that antisense-mediated inhibition of human immunodeficiency virus (HIV) replication by use of an HIV type 1-based vector results in severely attenuated mutants incapable of developing resistance. In February 2010 researchers reported success in reducing HIV viral load using patient T-cells which had been harvested, modified with an RNA antisense strand to the HIV viral envelope protein, and re-infused into the patient during a planned lapse in retroviral drug therapy.

[1399] High cholesterol: In 2010 mipomersen (previously ISIS 301012, trade name Kynamro) successfully completed phase 3 trials for some types of high cholesterol. Mipomersen is a cholesterol-reducing drug candidate. It is an antisense therapeutic that targets the messenger RNA for apolipoprotein B. See: Merki E, Graham M J, Mullick A E, et al. (August 2008). “Antisense oligonucleotide directed to human apolipoprotein B-100 reduces lipoprotein(a) levels and oxidized phospholipids on human apolipoprotein B-100 particles in lipoprotein(a) transgenic mice”. Circulation 118 (7): 743-53; El Harchaoui K, Akdim F, Stroes E S, Trip M D, Kastelein J J (2008). “Current and future pharmacologic options for the management of patients unable to achieve low-density lipoprotein-cholesterol goals with statins”. Am J Cardiovasc Drugs 8 (4): 233-42; Athyros V G, Kakafika Al, Tziomalos K, Karagiannis A, Mikhailidis D P (July 2008). “Antisense technology for the prevention or the treatment of cardiovascular disease: the next blockbuster?”. Expert Opin Investig Drugs 17 (7): 969-72. It is administered as a weekly injection. The compound is a ‘second-generation’ antisense oligonucleotide; the nucleotides are linked with phosphorothioate linkages rather than the phosphodiester linkages of RNA and DNA, and the sugar parts are deoxyribose in the middle part of the molecule and 2′-O-methoxyethyl-modified ribose at the two ends. These modifications make the drug resistant to degradation by nucleases, allowing it to be administered weekly. The drug accumulates in the liver, which is convenient since apolipoprotein B predominantly acts there. The complete sequence is G*-C*-C*-U*-C*-dA-dG-dT-dC-dT-dG-dmC-dT-dT-dmC-G*-C*-A*-C*-C* (SEQ ID NO: 113) [d=2′-deoxy, *=2′-O-(2-methoxyethyl)] with 3′-5′ phosphorothioate linkages. The Phase 3 trials were in patients with familial hypercholesterolemia (FH), both homozygous (ho) and heterozygous (he). FH is a genetic disorder that causes exceptionally high levels of low-density lipoprotein cholesterol. Both trials showed exceptional performance with the highest efficacy seen so far in those two patient populations, and with relatively low drop-out rates compared to other injectable drugs.

[1400] Duchenne muscular dystrophy: In Duchenne muscular dystrophy (DMD), the patient's muscle cells break down and are lost, leading to progressive muscle weakness and death. AVI-4658 is a targeted antisense therapy to restore expression of dystrophin, a key protein which patients with Duchenne muscular dystrophy lack. Results from an open-label, phase 2, dose-escalation study with 19 patients showed that when treatment was completed, a muscle biopsy was taken from each patient. The team discovered that the patients' ability to produce functional mRNA through “exon skipping’ was repaired with the use of AVI-4658, eventually allowing them to manufacture functional dystrophin protein.

[1401] Myotonic dystrophy: Myotonic dystrophy is the most common muscular disease in adults, affecting mainly the skeletal muscles, heart and central nervous system. It occurs because of a mutation that causes numerous repeats of three letters of the genetic code (CTG) in a gene called DMPK. The messenger RNA that is produced from the mutated gene also contains the abnormal long repeats that cause the RNA to accumulate in the cell's nucleus. There it sequesters and blocks the function of a protein called Muscleblind-like 1 and activates another protein called CELF1. These proteins antagonize one another and the result is abnormal expression of proteins from many other genes in adult tissues, resulting in disease. To counteract this, Cooper and his colleagues created antisense oligonucleotides that are simply strands of genetic material that seek out portions of the abnormal RNA repeats and target RNase H to the toxic RNA causing its degradation. It was also reported that combining the antisense oligonucleotides with other antisense oligonucleotides that help released the sequestered Muscleblind-like1 can enhance the effect.

[1402] Diabetes: SGLT2 (ISIS 388626) is an antisense drug to achieve reduction in sodium dependent glucose co-transporter type 2 (SGLT2) levels that resulted in a significant reduction in blood glucose levels in diabetic patients.

[1403] Hepatitis: Persistent hepatitis C virus (HCV) infection is a leading cause of liver disease. Antisense oligonucleotides represent a promising class of antiviral agents. Such drugs under development include ISIS 14803, which is a 20-unit phosphorothioate oligodeoxynucleotide that inhibits HCV replication and protein expression.

### Methods of Treatment

[1404] Provided oligonucleotides and compositions thereof, described herein, are useful as therapeutic agents against various disease states, including use as antiviral agents. In some embodiments, provided oligonucleotides can be used as agents for treatment of diseases through modulation of DNA and/or RNA activity. In some embodiments, provided oligonucleotides can be used for inhibiting specific gene expression. For example, a provided oligonucleotide can be complementary to a specific target messenger RNA (mRNA) sequence. It can be used to inhibit viral replication of myriad viruses. Exemplary virus families include orthomyxoviruses, pox viruses, herpes viruses, papilloma viruses, picornaviruses, flaviviruses, retroviruses, hepatitis viruses, paramyxoviruses, reoviruses, parvoviruses, filoviruses, coronaviruses, arenaviruses, rhabdoviruses and adenoviruses. Additional virus families are known and are also contemplated herein. Other examples include uses as antisense compounds against HIV RNA or other retroviral RNA or for hybridizing to HIV mRNA encoding the tat protein, or to the TAR region of HIV mRNA. In some embodiments, the nucleic acids mimic the secondary structure of the TAR region of HIV mRNA, and by doing so bind the tat protein. In some embodiments, a provided oligonucleotide is used to inhibit expression of a target protein by contacting a cell with a provided oligonucleotide, wherein the expression of other proteins in the cell are not inhibited or are minimally inhibited. In some embodiment, target protein inhibition occurs in vivo in a mammal. In some embodiments, a therapeutically effective amount of a provided oligonucleotide is administered for inhibiting the expression of a target protein.

[1405] Other examples of proteins where expression can be modulated include Jun N-terminal kinase (JNK) proteins, diacylglycerol acyltransferase I, apolipoprotein B, glucagon receptor, Aurora B, acyl CoA cholesterol acyltransferase-2, c-reactive protein, STAT (signal transducers and activators of transcription) family of proteins, and MDR P-glycoprotein. In some embodiments, a provided oligonucleotide can be used to inhibit protein phosphatase 1B (PTP1B) expression, RNA-dependent RNA viral polymerase. In some embodiments, a provided oligonucleotide can be used to induce events such as apoptosis in cancer cells or to make a cell more susceptible to apoptosis. In some embodiments, a provided oligonucleotide can be used to modulate activities of proteins. In some embodiments, a provided oligonucleotide can help modulate RNase H activity targeting multidrug resistance (MDR) RNA molecules.

[1406] In some embodiments, the present invention provides methods of treating a disease mediated by undesired gene expression in a subject (e.g., mammals, such as humans) in need of such treatment. By “diseases” is meant diseases, or disease symptoms. Methods include, e.g., administering to the subject an effective amount of a provided oligonucleotide.

[1407] Examples of diseases mediated by undesired gene expression include cancer (e.g., leukemia, tumors, and metastases), allergy, asthma, obesity, inflammation (e.g., inflammatory diseases such as inflammatory airways disease), hypercholesterolemia, hematological disorders, severe acute respiratory syndrome (SARS), obstructive airways disease, asthma, autoimmune diseases, retroviral diseases such as AIDS or HIV, other viral infections, intrauterine infections, metabolic diseases, infection (e.g., bacterial, viral, yeast, fungal), CNS diseases, brain tumors, degenerative neural diseases, cardiovascular diseases, and diseases associated with angiogenesis, neovascularization, and vasculogenesis.

[1408] In some embodiments, provided oligonucleotides are useful for treating cancer, including pancreatic cancer, and other diseases or disorders involving abnormal cell proliferation.

[1409] Located in the upper abdomen (in the retroperitoneum), the pancreas is a dual-function gland of the digestive and endocrine system. In certain instances, the pancreas functions as an endocrine gland (e.g., producing several important hormones). In certain instances, the pancreas functions as an exocrine gland (e.g., secreting fluids containing digestive enzymes that pass to the small intestine).

[1410] Pancreatic cancer is the fourth most common cause of cancer death in the US (after lung, colon and breast), comprising 6% of all cancer-related deaths. In 2008, an estimated 37,680 new cases of pancreatic cancer will have been diagnosed in the US, with 34,290 deaths. Incidence of the disease, rises linearly after age 50, with the only definitive risk factor being cigarette smoking (smokers are four times more likely to develop the disease than non-smokers). Invasive pancreatic cancer is almost always fatal. The collective median survival time of all patients is 4-6 months. Relative 1-year survival is 24%; the overall 5-year survival rate <5%.

[1411] Pancreatic cancer is asymptomatic in its early stage and often remains undiagnosed for several months (less than one third of patients being diagnosed within 2 months of the onset symptoms). In certain instances, the delayed diagnosis results in (either partially or fully) metastasis of the cancerous cells to the liver or lymph nodes.

[1412] Currently, surgery (resectioning of the pancreas) is the primary and only curative therapy for pancreatic cancer. However, only 15-25% of tumors are resectable at the time of diagnosis and only 10-20% of patients undergoing surgery survive more than two years. Once tumor infiltration occurs and other tissues have been affected, surgery is no longer possible.

[1413] In certain instances, diabetes mellitus or pancreatitis predisposes an individual to develop a proliferative disorder of a plurality of pancreatic cells. In certain instances, individuals are at an increased risk of developing a proliferative disorder of a plurality of pancreatic cells due to a hereditary syndrome selected from the group consisting of hereditary nonpolyposis colorectal cancer (HNPCC) and familial adenomatous polyposis (FAP). In certain instances, individuals are at an increased risk of developing a proliferative disorder of a plurality of pancreatic cells due to a mutation in a gene selected from the group consisting of MSH2, MSH6, MLH1, and APC.

[1414] Ideally, effective treatment of pancreatic cancer should (i) control the primary tumor mass, both initially and subsequently, and (ii) treat the metastatic tumor cells. Chemoprevention (the administration of agents such as drugs, biologics, nutrients and the like) slows the progression of, reverses, or inhibits carcinogenesis, thereby lowering the risk of developing invasive or clinically significant disease.

[1415] Disclosed herein, in certain embodiments, are methods of treating pancreatic cancer. As used herein, “pancreatic cancer” includes forms of cancer of the pancreas. In some embodiments, a pancreatic cancer is metastatic pancreatic cancer. In some embodiments, a pancreatic cancer is a carcinoma, sarcoma, cancer, or combinations thereof. In some embodiments, a pancreatic cancer to be treated includes sporadic and hereditary pancreatic cancers. In some embodiments, a pancreatic cancer is duct cell carcinoma, acinar cell carcinoma, papillary mucinous carcinoma, signet ring carcinoma, adenosquamous carcinoma, undifferentiated carcinoma, mucinous carcinoma, giant cell carcinoma, small cell carcinoma, cystcancer, serous cystcancer, mucinous cystcancer, unclassified pancreatic cancer, pancreatoblastoma, or combinations thereof.

[1416] In some embodiments, an individual in need of treatment for pancreatic cancer presents with a localized tumor of the pancreas. In some embodiments, an individual in need of treatment for pancreatic cancer presents with a negative regional lymph node biopsy. In some embodiments, an individual in need of treatment for pancreatic cancer presents with a positive regional lymph node biopsy. In some embodiments, an individual in need of treatment for pancreatic cancer presents with a nodal negative pancreatic tumor (e.g., node-negative). In some embodiments, an individual in need of treatment for pancreatic cancer presents with a nodal positive tumor (e.g., node-positive).

[1417] In some embodiments, a pancreatic cancer in an individual in need of treatment for pancreatic cancer has metastasized to other locations in the body. In some embodiments, a pancreatic cancer has metastasized to a location selected from the group consisting of lymph node, stomach, bile duct, liver, bone, ovary, peritoneum and brain.

[1418] In some embodiments, cancer cells or precancerous cells are identified by histological typing or grading of a tissue sample (e.g., a biopsy sample). In some embodiments, cancer cells or precancerous cells are identified through the use of appropriate molecular markers.

[1419] In some embodiments, a pancreatic cancer in an individual in need of treatment for pancreatic cancer is staged according to the American Joint Committee on Cancer (AJCC) TNM classification system, where the tumor (T) has been assigned a stage of Tx, T1, T2, T3, T4; and where the regional lymph nodes (N) have been assigned a stage of NX, N0, N1; and where distant metastasis (M) has been assigned a stage of MX, M0, or M1. In some embodiments, a pancreatic cancer in an individual in need of treatment for pancreatic cancer is staged as Stage 0, I, IA, IB, II, IIA, IIB, III, and IV pancreatic cancer. In some embodiments, a pancreatic cancer in an individual in need of treatment for pancreatic cancer is staged as Grade GX (e.g., grade cannot be assessed), Grade 1, Grade 2, Grade 3 or Grade 4.

[1420] More specific examples of cancers treated with provided oligonucleotides include breast cancer, lung cancer, melanoma, colorectal cancer, bladder cancer, ovarian cancer, prostate cancer, renal cancer, squamous cell cancer, glioblastoma, Kaposi's sarcoma, multiple myeloma, and leukemia.

### Evaluation and Treatment of Cancer

[1421] The term “tumor cell antigen” is defined herein as an antigen that is present in higher quantities on a tumor cell or in body fluids than unrelated tumor cells, normal cells, or in normal body fluid. The antigen presence may be tested by any number of assays known to those skilled in the art and include without limitation negative and/or positive selection with antibodies, such as an ELISA assay, a radioimmunoassay, or by Western Blot.

[1422] “Apoptosis inducing agent” is defined herein to induce apoptosis/programmed cell death, and include, for example, anticancer agents and treatments wherein cells (e.g., tumor cells) are induced to undergo programmed cell death. Exemplary apoptosis inducing agents are described in more detail below.

[1423] The terms “apoptosis” or “programmed cell death,” refers to the physiological process by which unwanted or useless cells are eliminated during development and other normal biological processes. Apoptosis is a mode of cell death that occurs under normal physiological conditions and the cell is an active participant in its own demise (“cellular suicide”). It is most often found during normal cell turnover and tissue homeostasis, embryogenesis, induction and maintenance of immune tolerance, development of the nervous system and endocrine-dependent tissue atrophy. Cells undergoing apoptosis show characteristic morphological and biochemical features. These features include chromatin aggregation, nuclear and cytoplasmic condensation, partition of cytoplasm and nucleus into membrane bound vesicles (apoptotic bodies), which contain ribosomes, morphologically intact mitochondria and nuclear material. In vivo, these apoptotic bodies are rapidly recognized and phagocytized by macrophages, dendritic cells or adjacent epithelial cells. Due to this efficient mechanism for the removal of apoptotic cells in vivo no inflammatory response is elicited. In vitro, the apoptotic bodies as well as the remaining cell fragments ultimately swell and finally lyse. This terminal phase of in vitro cell death has been termed “secondary necrosis.” Apoptosis can be measured by methods known to those skilled in the art like DNA fragmentation, exposure of Annexin V, activation of caspases, release of cytochrome c, etc. A cell that has been induced to die is termed herein as an “apoptotic cell.” Apoptosis can also be tested using a standard Annexin V Apoptosis Assay: NIH:OVCAR-3 cells are grown in 6-well plates (NUNC) and irradiated or treated with an antagonist (or in combination with another anti-cancer drug) for 4-48 hours, washed and stained with Annexin V-FITC (BD-Pharmingen) for 1 hour. Cells are analyzed by flow cytometry (Becton-Dickinson, CellQuest), counterstained with Propidium Iodide and analyzed again in the flow cytometer.

[1424] Patients can be assessed with respect to symptoms at one or more multiple time points including prior to, during, and after treatment regimens. Treatment can result in improving the subject's condition and can be assessed by determining if one or more of the following factors has occurred: decreased tumor size, decreased cell proliferation, decreased numbers of cells, decreased neovascularization, increased apoptosis, or decreased survival of at least a portion of the tumor cells. One or more of these occurrences may, in some cases, result in partial or total elimination of the cancer and prolongation of survival of the patient. Alternatively, for terminal stage cancers, treatment may result in stasis of disease, better quality of life and/or prolongation of survival.

### Methods of Assaying Cell Migration

[1425] Assays for cell migration have been described in the literature, e.g., by Brooks, et al., J. Clin. Invest 1997, 99:1390-1398 and methods for measuring cell migration are known to those of skill in the art. In one method for measuring cell migration described herein, membranes from transwell migration chambers are coated with substrate, the transwells washed, and non-specific binding sites blocked with BSA. Tumor cells from sub-confluent cultures are harvested, washed, and resuspended in migration buffer in the presence or absence of assay antibodies. After the tumor cells are allowed to migrate to the underside of the coated transwell membranes, the cells remaining on the top-side of the membrane are removed and cells that migrate to the under-side are stained with crystal violet. Cell migration is then quantified by direct cell counts per microscopic field.

### Methods of Assaying Tumor Growth

[1426] Tumor growth can be assayed by methods known to those of skill in the art, e.g., the SCID mouse model, the nude mouse model, and BALB/c mice with syngeneic tumors. SCID mouse models for tumor growth are carried out as follows: subconfluent human M21 melanoma cells (or any desired tumor cell type) are harvested, washed, and resuspended in sterile PBS (20×106 per mL). SCID mice are injected subcutaneously with 100 μL of M21 human melanoma cell (2×106) suspension. Three days after tumor cell injection, mice are either untreated or treated intraperitoneally with an antagonist in the desired dose ranges. The mice are treated daily for 24 days. Tumor size is measured with calipers and the volume estimated using the formula V═(L×W2)/2, where V is equal to the volume, L is equal to the length, and W is equal to the width.

[1427] Alternatively, nude mouse models, SCID mouse models and/or BALB/c syngeneic mouse models can also be utilized to assess tumor growth and inhibition thereof by the humanized anti-endoglin antibodies or antigen-binding fragments described herein.

### Methods of Assaying Cell Proliferation

[1428] Cell proliferation can be assayed by methods known to those of skill in the art. As described herein, subconfluent human endothelial cells (HUVECs) can be resuspended in proliferation buffer containing low (5.0%) serum in the presence or absence of CM (25 μL) from ECV or ECVL cells, and endothelial cells allowed to proliferate for 24 hours. Proliferation can be quantified by measuring mitochondrial dehydrogenase activity using a commercially available WST-1 assay kit (Chemicon). Also, as described herein, proliferation can be quantified by measuring 3H incorporation using standard methods. (She et al., Int. J. Cancer, 108: 251-257 (2004)).

[1429] Other methods of assessing cell proliferation are known in the art and are contemplated herein. Further non-limiting examples are described in more detail in the examples.

[1430] One would understand that classification and staging systems described herein represent one means to assess treatment of cancers described herein; additionally, other staging schemes are known in the art and may be used in connection with the methods described herein. By way of example only, the TNM classification of malignant tumors may be used as a cancer staging system to describe the extent of cancer in a patient's body. T describes the size of the tumor and whether it has invaded nearby tissue, N describes regional lymph nodes that are involved, and M describes distant metastasis. TNM is maintained by the International Union Against Cancer (UICC) and is used by the American Joint Committee on Cancer (AJCC) and the International Federation of Gynecology and Obstetrics (FIGO). One would understand that not all tumors have TNM classifications such as, for example, brain tumors. Generally, T (a,is,(0), 1-4) is measured as the size or direct extent of the primary tumor. N (0-3) refers to the degree of spread to regional lymph nodes: N0 means that tumor cells are absent from regional lymph nodes, N1 means that tumor cells spread to the closest or small numbers of regional lymph nodes, N2 means that tumor cells spread to an extent between N1 and N3; N3 means that tumor cells spread to most distant or numerous regional lymph nodes. M (0/1) refers to the presence of metastasis: MO means that no distant metastasis are present; M1 means that metastasis has occurred to distant organs (beyond regional lymph nodes). Other parameters may also be assessed. G (1-4) refers to the grade of cancer cells (i.e., they are low grade if they appear similar to normal cells, and high grade if they appear poorly differentiated). R (0/1/2) refers to the completeness of an operation (i.e., resection-boundaries free of cancer cells or not). L (0/1) refers to invasion into lymphatic vessels. V (0/1) refers to invasion into vein. C (1-4) refers to a modifier of the certainty (quality) of V.

[1431] Provided herein are methods for degrading, inhibiting the growth of or killing cancer cells comprising contacting the cells with an amount of a compound described herein effective to degrade, inhibit the growth of or kill cancer cells.

[1432] Provided herein are methods of inhibiting tumor size increase, reducing the size of a tumor, reducing tumor proliferation or preventing tumor proliferation in an individual comprising administering to said individual an effective amount of a compound described herein to inhibit tumor size increase, reduce the size of a tumor, reduce tumor proliferation or prevent tumor proliferation. Treatment of tumors in some cases includes stasis of symptoms, that is, by treating the patient, the cancer does not worsen and survival of the patient is prolonged.

[1433] Patients may be assessed with respect to symptoms at one or more multiple time points including prior to, during, and after treatment regimens. Treatment can result in improving the subject's condition and can be assessed by determining if one or more of the following events has occurred: decreased tumor size, decreased tumor cell proliferation, decreased numbers of cells, decreased neovascularization and/or increased apoptosis. One or more of these occurrences may, in some cases, result in partial or total elimination of the cancer and prolongation of survival of the patient. Alternatively, for terminal stage cancers, treatment may result in stasis of disease, better quality of life and/or prolongation of survival.

[1434] Other methods of assessing treatment are known in the art and contemplated herein. In an exemplary embodiment, the pro-oligonucleotide compounds of the invention are administered to a subject such as a mammal (e.g., a human), suffering from a medical disorder, e.g., a cancer, or non-malignant conditions characterized by the presence of a class of unwanted cells.

[1435] Primary outcome measures may be assessed for patients treated using the methods described herein and include, for example, progression-free survival. In one embodiment, an increase in progression free survival is observed in an amount of by about 2-fold, 5-fold, 10-fold, 20 fold, 50 fold or more compared to lack of treatment. In another embodiment, an increase in progression free survival is increased survival by about 3 months, about 6 months, about 9 months, about 12 months, about 18 months, about 2 years, about 3 years, about 4 years, about 5 years or more compared to lack of treatment.

[1436] Secondary outcome measures may also be assessed and include duration of response, time to tumor progression, overall survival, serious and non-serious adverse events. For example, a treatment may prevent progression of the disease (i.e., stasis) or may result in an improvement. Alternately, or in addition, other goals can be measured with respect to one or more of the following: decreased tumor burden, decreased neovascularization, reduced side effects, decreased adverse reactions, and/or increased patient compliance.

[1437] Other specific examples of diseases or disorders for which treatment by the compounds or compositions of the invention are useful for treatment or prevention include, but are not limited to transplant rejection (e.g., kidney, liver, heart, lung, islet cells, pancreas, bone marrow, cornea, small bowel, skin allografts or xenografts and other transplants), graft vs. host disease, osteoarthritis, rheumatoid arthritis, multiple sclerosis, diabetes, diabetic retinopathy, inflammatory bowel disease (e.g., Crohn's disease, ulcerative colitis, and other bowel diseases), renal disease, cachexia, septic shock, lupus, myasthenia gravis, psoriasis, dermatitis, eczema, seborrhea, Alzheimer's disease, Parkinson's disease, stem cell protection during chemotherapy, ex vivo selection or ex vivo purging for autologous or allogeneic bone marrow transplantation, ocular disease, retinopathies (e.g., macular degeneration, diabetic retinopathy, and other retinopathies), corneal disease, glaucoma, infections (e.g., bacterial, viral, or fungal), heart disease, including, but not limited to, restenosis.

### Activation of RNAse L

[1438] The 2′-5′ oligoadenylate (2-5A)/RNase L pathway is one of the enzymatic pathways induced by interferon. Rnase L is activated after binding to 5′-phosphorylated fragments of 2′-5′ adenylic acid. These fragments of 2′-5′ adenylic acid (2-5A) are produced under the control of 2′-5′ oligo(A) synthetase. This pathway is part of the innate immune system and has an important role in preventing viral infection. 2-5A-Induced cleavage of single-stranded RNA results in apoptosis. Biostable phosphorothioate analogs of 2-5A have been shown to be potent activators of Rnase L (Xianh et al., Cancer Research (2003), 63:6795-6801). In this study, the 2-5A analogs induced Rnase L activity and caused apoptosis in cultures of late-stage, metastatic human prostate cancer cell lines DU145, PC3 and LNCaP.

[1439] Sustained activation of RNase L triggers a mitochondrial pathway of apoptosis that eliminates virus-infected cells as well as cancerous/tumor cells. RNase L can inhibit fibrosarcoma growth, prostate cancer growth, colorectal cancer growth and pancreatic cancer growth. Given the common role of RNase L in different cancers, it is contemplated that the invention described herein can be use for the treatment of any type of cancer. Silverman, RH, Cytokine Growth Factor Rev, 18 (5-6): 381-388 (2007); Bisbal, C. and Silverman, RH, Biochimie. 89 (6-7): 789-798 (2007). By way of example, downregulation of RNase L refers to any reduction in expression levels of the gene or genes encoding RNase L, silencing of the gene or genes encoding RNase L, reduction in the levels of expression/translation of the proteins comprising RNase L, reduction in the amount of RNase L present within a cell, and/or any reduction in activity of RNase L as compared to a predetermined level of RNase L in an exemplary healthy population. Alternatively any reduction in RNase L levels as described herein can be indicative of downregulation of RNase L.

[1440] In some embodiments, provided oligonucleotides are useful for the treatment of diseases having downregulated RNase L. In some embodiment, a disease associated with downregulated RNase L is cancer. In some embodiments, the cancer is pancreatic cancer, prostate cancer, or colorectal cancer. Alternatively, provided oligonucleotides described herein are useful for the treatment of disease having upregulated RNase L. In some embodiments, the disease having upregulated RNase L is chronic fatigue syndrome. Additional diseases having upregulated RNase L are known in the art and contemplated herein.

[1441] When used as therapeutics, a provided oligonucleotide is administered as a pharmaceutical composition. In some embodiments, the pharmaceutical composition comprises a therapeutically effective amount of a provided oligonucleotide comprising, or a pharmaceutically acceptable salt thereof, and at least one pharmaceutically acceptable inactive ingredient selected from pharmaceutically acceptable diluents, pharmaceutically acceptable excipients, and pharmaceutically acceptable carriers. In another embodiment, the pharmaceutical composition is formulated for intravenous injection, oral administration, buccal administration, inhalation, nasal administration, topical administration, ophthalmic administration or otic administration. In further embodiments, the pharmaceutical composition is a tablet, a pill, a capsule, a liquid, an inhalant, a nasal spray solution, a suppository, a suspension, a gel, a colloid, a dispersion, a suspension, a solution, an emulsion, an ointment, a lotion, an eye drop or an ear drop.

### Pharmaceutical Compositions

[1442] When used as therapeutics, a provided oligonucleotide or oligonucleotide composition described herein is administered as a pharmaceutical composition. In some embodiments, the pharmaceutical composition comprises a therapeutically effective amount of a provided oligonucleotides, or a pharmaceutically acceptable salt thereof, and at least one pharmaceutically acceptable inactive ingredient selected from pharmaceutically acceptable diluents, pharmaceutically acceptable excipients, and pharmaceutically acceptable carriers. In some embodiments, the pharmaceutical composition is formulated for intravenous injection, oral administration, buccal administration, inhalation, nasal administration, topical administration, ophthalmic administration or otic administration. In some embodiments, the pharmaceutical composition is a tablet, a pill, a capsule, a liquid, an inhalant, a nasal spray solution, a suppository, a suspension, a gel, a colloid, a dispersion, a suspension, a solution, an emulsion, an ointment, a lotion, an eye drop or an ear drop.

[1443] In some embodiments, the present invention provides a pharmaceutical composition comprising chirally controlled oligonucleotide, or composition thereof, in admixture with a pharmaceutically acceptable excipient. One of skill in the art will recognize that the pharmaceutical compositions include the pharmaceutically acceptable salts of the chirally controlled oligonucleotide, or composition thereof, described above.

### Compounds for Enhancing and Targeting Delivery

[1444] A provided oligonucleotide as described herein can be delivered using a variety of delivery strategies, including conjugates of nucleic acids with various ligands, as well as use of nanocarrier approaches. Any nucleic acid delivery strategies are contemplated for use with provided oligonucleotides described herein. The choice between exemplary delivery strategies, including but not limited to, chemical conjugates, cationic lipid/liposomal transfer vesicles and supramolecular nanocarriers depends on the therapeutic context, and methods for determining the optimal delivery modality are known in the art and further contemplated herein.

### Cell Penetrating Compounds (“CPCs”)

[1445] Numerous compounds are known to act as carriers for cargo such as nucleic acids and facilitate entry of the nucleic acid in a cell in an in vivo setting. Exemplary carriers are described in Dietz et al., Molecular & Cellular Neuroscience, 27(2): 85-131 (2004) which is incorporated herein by reference. The prototypical CPCs derived from the Tat and antennapedia transcriptional regulators have been joined by a large number of new moieties. As an example, CPCs that are peptides can be relatively short (9-30 amino acids) polycationic peptides rich in argine and lysine, or membrane-interactive hydrophobic sequences. CPCs can be linked by recombinant DNA techniques or chemically coupled to peptides, oligonucleotides or nanocarriers, which then comprise the ‘cargo’ for the CPC.

### Cell Targeting Ligands (“CTLs”)

[1446] Another strategy is to deliver oligonucleotides by use of a CTL that binds with high affinity to a cell surface receptor that is capable of undergoing efficient internalization. Potential ligands include antibodies, polypeptides derived from phage display libraries, and small organic molecules. Additional cell-targeting ligands are known in the art, or will be developed, and are contemplated for use with the invention described herein (for ASGPR-GalNAc conjugated siRNA and oligonucleotides, e.g., WO2012037254A1). Because various receptors are often preferentially expressed on particular cell types, this approach offers the possibility of improved selectivity for the oligonucleotide reagents. Exemplary receptor targets include, but are not limited to, lipoprotein receptors (such as those in the liver), integrins, receptor tyrosine kinases, and the G-protein coupled receptor (GPCR) superfamily.

### Nanocarriers

[1447] A variety of supramolecular nanocarriers can be used to deliver nucleic acids. Exemplary nanocarriers include, but are not limited to liposomes, cationic polymer complexes and various polymeric. Complexation of nucleic acids with various polycations is another approach for intracellular delivery; this includes use of PEGlyated polycations, polyethyleneamine (PEI) complexes, cationic block co-polymers, and dendrimers. Several cationic nanocarriers, including PEI and polyamidoamine dendrimers help to release contents from endosomes. Other approaches include use of polymeric nanoparticles, polymer micelles, quantum dots and lipoplexes.

[1448] Additional nucleic acid delivery strategies are known in addition to the exemplary delivery strategies described herein.

[1449] In therapeutic and/or diagnostic applications, the compounds of the invention can be formulated for a variety of modes of administration, including systemic and topical or localized administration. Techniques and formulations generally may be found in Remington, The Science and Practice of Pharmacy, (20th ed. 2000).

[1450] Provided oligonucleotides, and compositions thereof, are effective over a wide dosage range. For example, in the treatment of adult humans, dosages from about 0.01 to about 1000 mg, from about 0.5 to about 100 mg, from about 1 to about 50 mg per day, and from about 5 to about 100 mg per day are examples of dosages that may be used. The exact dosage will depend upon the route of administration, the form in which the compound is administered, the subject to be treated, the body weight of the subject to be treated, and the preference and experience of the attending physician.

[1451] Pharmaceutically acceptable salts are generally well known to those of ordinary skill in the art, and may include, by way of example but not limitation, acetate, benzenesulfonate, besylate, benzoate, bicarbonate, bitartrate, bromide, calcium edetate, carnsylate, carbonate, citrate, edetate, edisylate, estolate, esylate, fumarate, gluceptate, gluconate, glutamate, glycollylarsanilate, hexylresorcinate, hydrabamine, hydrobromide, hydrochloride, hydroxynaphthoate, iodide, isethionate, lactate, lactobionate, malate, maleate, mandelate, mesylate, mucate, napsylate, nitrate, pamoate (embonate), pantothenate, phosphate/diphosphate, polygalacturonate, salicylate, stearate, subacetate, succinate, sulfate, tannate, tartrate, or teoclate. Other pharmaceutically acceptable salts may be found in, for example, Remington, The Science and Practice of Pharmacy (20th ed. 2000). Preferred pharmaceutically acceptable salts include, for example, acetate, benzoate, bromide, carbonate, citrate, gluconate, hydrobromide, hydrochloride, maleate, mesylate, napsylate, pamoate (embonate), phosphate, salicylate, succinate, sulfate, or tartrate.

[1452] Depending on the specific conditions being treated, such agents may be formulated into liquid or solid dosage forms and administered systemically or locally. The agents may be delivered, for example, in a timed- or sustained-low release form as is known to those skilled in the art. Techniques for formulation and administration may be found in Remington, The Science and Practice of Pharmacy (20th ed. 2000). Suitable routes may include oral, buccal, by inhalation spray, sublingual, rectal, transdermal, vaginal, transmucosal, nasal or intestinal administration; parenteral delivery, including intramuscular, subcutaneous, intramedullary injections, as well as intrathecal, direct intraventricular, intravenous, intra-articular, intra-sternal, intra-synovial, intra-hepatic, intralesional, intracranial, intraperitoneal, intranasal, or intraocular injections or other modes of delivery.

[1453] For injection, the agents of the invention may be formulated and diluted in aqueous solutions, such as in physiologically compatible buffers such as Hank's solution, Ringer's solution, or physiological saline buffer. For such transmucosal administration, penetrants appropriate to the barrier to be permeated are used in the formulation. Such penetrants are generally known in the art.

[1454] Use of pharmaceutically acceptable inert carriers to formulate the compounds herein disclosed for the practice of the invention into dosages suitable for systemic administration is within the scope of the invention. With proper choice of carrier and suitable manufacturing practice, the compositions of the present invention, in particular, those formulated as solutions, may be administered parenterally, such as by intravenous injection.

[1455] The compounds can be formulated readily using pharmaceutically acceptable carriers well known in the art into dosages suitable for oral administration. Such carriers enable the compounds of the invention to be formulated as tablets, pills, capsules, liquids, gels, syrups, slurries, suspensions and the like, for oral ingestion by a subject (e.g., patient) to be treated.

[1456] For nasal or inhalation delivery, the agents of the invention may also be formulated by methods known to those of skill in the art, and may include, for example, but not limited to, examples of solubilizing, diluting, or dispersing substances such as, saline, preservatives, such as benzyl alcohol, absorption promoters, and fluorocarbons.

[1457] Pharmaceutical compositions suitable for use in the present invention include compositions wherein the active ingredients are contained in an effective amount to achieve its intended purpose. Determination of the effective amounts is well within the capability of those skilled in the art, especially in light of the detailed disclosure provided herein.

[1458] In addition to the active ingredients, these pharmaceutical compositions may contain suitable pharmaceutically acceptable carriers comprising excipients and auxiliaries which facilitate processing of the active compounds into preparations which can be used pharmaceutically. The preparations formulated for oral administration may be in the form of tablets, dragees, capsules, or solutions.

[1459] Pharmaceutical preparations for oral use can be obtained by combining the active compounds with solid excipients, optionally grinding a resulting mixture, and processing the mixture of granules, after adding suitable auxiliaries, if desired, to obtain tablets or dragee cores. Suitable excipients are, in particular, fillers such as sugars, including lactose, sucrose, mannitol, or sorbitol; cellulose preparations, for example, maize starch, wheat starch, rice starch, potato starch, gelatin, gum tragacanth, methyl cellulose, hydroxypropylmethyl-cellulose, sodium carboxymethyl-cellulose (CMC), and/or polyvinylpyrrolidone (PVP: povidone). If desired, disintegrating agents may be added, such as the cross-linked polyvinylpyrrolidone, agar, or alginic acid or a salt thereof such as sodium alginate.

[1460] Dragee cores are provided with suitable coatings. For this purpose, concentrated sugar solutions may be used, which may optionally contain gum arabic, talc, polyvinylpyrrolidone, carbopol gel, polyethylene glycol (PEG), and/or titanium dioxide, lacquer solutions, and suitable organic solvents or solvent mixtures. Dye-stuffs or pigments may be added to the tablets or dragee coatings for identification or to characterize different combinations of active compound doses.

[1461] Pharmaceutical preparations that can be used orally include push-fit capsules made of gelatin, as well as soft, sealed capsules made of gelatin, and a plasticizer, such as glycerol or sorbitol. The push-fit capsules can contain the active ingredients in admixture with filler such as lactose, binders such as starches, and/or lubricants such as talc or magnesium stearate and, optionally, stabilizers. In soft capsules, the active compounds may be dissolved or suspended in suitable liquids, such as fatty oils, liquid paraffin, or liquid polyethylene glycols (PEGs). In addition, stabilizers may be added.

[1462] Depending upon the particular condition, or disease state, to be treated or prevented, additional therapeutic agents, which are normally administered to treat or prevent that condition, may be administered together with the inhibitors of this invention. For example, chemotherapeutic agents or other anti-proliferative agents may be combined with the inhibitors of this invention to treat proliferative diseases and cancer. Examples of known chemotherapeutic agents include, but are not limited to, adriamycin, dexamethasone, vincristine, cyclophosphamide, fluorouracil, topotecan, taxol, interferons, and platinum derivatives.

[1463] Other examples of agents the non-racemic pro-oligonucleotide of this invention may also be combined with include, without limitation, anti-inflammatory agents such as corticosteroids, TNF blockers, IL-1 RA, azathioprine, cyclophosphamide, and sulfasalazine; immunomodulatory and immunosuppressive agents such as cyclosporin, tacrolimus, rapamycin, mycophenolate mofetil, interferons, corticosteroids, cyclophophamide, azathioprine, and sulfasalazine; neurotrophic factors such as acetylcholinesterase inhibitors, MAO inhibitors, interferons, anti-convulsants, ion channel blockers, riluzole, and anti-Parkinsonian agents; agents for treating cardiovascular disease such as beta-blockers, ACE inhibitors, diuretics, nitrates, calcium channel blockers, and statins; agents for treating liver disease such as corticosteroids, cholestyramine, interferons, and anti-viral agents; agents for treating blood disorders such as corticosteroids, anti-leukemic agents, and growth factors; agents for treating diabetes such as insulin, insulin analogues, alpha glucosidase inhibitors, biguanides, and insulin sensitizers; and agents for treating immunodeficiency disorders such as gamma globulin.

[1464] These additional agents may be administered separately, as part of a multiple dosage regimen, from provided chirally controlled oligonucleotides, and composition thereof. Alternatively, these agents may be part of a single dosage form, mixed together with the provided chirally controlled oligonucleotides, and composition thereof, in a single composition.

[1465] The examples and preparations provided below further illustrate and exemplify provided oligonucleotides and compositions thereof, and methods of preparing the same. It is to be understood that the scope of the present invention is not limited in any way by the scope of the following examples and preparations.

[1466] The function and advantage of these and other embodiments of the present invention will be more fully understood from the examples described below. The following examples are intended to illustrate the benefits of the present invention, but do not exemplify the full scope of the invention.

### Method of Analyzing Oligonucleotide Compositions

[1467] In some embodiments, the present invention provides methods for analyzing oligonucleotide compositions. In some embodiments, a provided method detects, determines, and/or quantifies, for example, the identity, purity, quantity and/or quality of one or more oligonucleotides. In some embodiments, the present invention provides a method comprising steps of:
[1468] a) performing a first analysis of a first composition, which first composition comprises a plurality of different types of an oligonucleotide; and
[1469] b) comparing the performed first analysis with a second analysis, under comparable conditions as the first analysis, of a second composition, which second composition is a chirally controlled composition of the oligonucleotide, where differences between the first and second analyses reflect differences in presence or level of at least one type of the oligonucleotide in the first as compared with the second composition.

[1470] In some embodiments, a second composition contains only a single type of the oligonucleotide. In some embodiments, a second composition contains more than one types of the oligonucleotide. In some embodiments, a provided method is used for quality control of oligonucleotide compositions, for example, as illustrated in Examples 17 and 48. As will be appreciated by those skilled in the art, the presented data in Example 48 confirm that the depicted analyses comparing the compositions show that the random oligonucleotide composition (the first composition), as prepared by non-chiral controlled oligonucleotide synthesis, comprises extremely low level of certain oligonucleotide types, such as the full Rp or Sp type of the chirally controlled composition (the second composition).

### EXEMPLIFICATION

[1471] The foregoing has been a description of certain non-limiting embodiments of the invention. Accordingly, it is to be understood that the embodiments of the invention herein described are merely illustrative of the application of the principles of the invention. Reference herein to details of the illustrated embodiments is not intended to limit the scope of the claims.

### General Description of Oligonucleotide Synthesis

[1472] As described above and herein, in some embodiments, the present invention provides oligonucleotides and the methods of preparing the same. In some embodiments, the synthesis of oligonucleotide is performed using solid support. In some embodiments, the synthesis of oligonucleotide is performed in solution. In some embodiments, the synthesis of oligonucleotide comprises steps using solid support and steps in solution phase. In some embodiments, the steps using solid support are performed on an oligonucleotide synthesizer.

[1473] Preparation of the Solid Support: The support (Highly Cross-linked Polystyrene (HCP) or Controlled Pore Glass (CPG)) was used to load the first 5′-O-DMTr protected nucleoside contained in the oligonucleotide sequence. In some embodiments, an oxalyl group was used to link the 3′—OH group of the first nucleoside to an amine group on the solid support, as described in Alul et al., Oxalyl-CPG: a labile support for synthesis of sensitive oligonucleotide derivatives, Nucleic Acids Research 1991, 19(7), 1527. In some embodiments, the standard succinyl group was used as the linker.

[1474] Detritylation of Nucleotide on the Solid Support: A solution of 3% TCA (trichloroacetic acid) in dichloromethane (DCM, CH₂Cl₂) was delivered to the column containing the support which was installed on a synthesizer to de-block the 5′-O-DMTr.

[1475] CMPT-Mediated Chiral Phosphoramidite Coupling: After washing of the solid support with anhydrous acetonitrile (ACN) and drying by reverse flush with dry argon, the free 5′-OH was coupled with the next nucleotide in the oligonucleotide sequence, growing from the 3′ to the 5′ end. This entailed co-delivery to the solid support of a solution of the chiral phosphoramidite together with CMPT (below), which resulted in highly efficient coupling with excellent diastereomeric excess (typically >99%) to give a chiral phosphite diester product, as described by Wada et al. J. Am. Chem. Soc., 2008, 130, 16031-1603; Angew. Chem. Intern. Ed. 2009, 48, 496-499. The solvent was normally acetonitrile (ACN), but other solvents could also be used.

[chemical structure]

Chiral Phosphoramidites Employed in these Studies:

[chemical structure]

[chemical structure]

[chemical structure]

[chemical structure]

[chemical structure]

[chemical structure]

[chemical structure]

[chemical structure]

[chemical structure]

[chemical structure]

[chemical structure]

[chemical structure]

[chemical structure]

[chemical structure]

[chemical structure]

[chemical structure]

[chemical structure]

[chemical structure]

### Additional Phosphoramidites:

[chemical structure]

[chemical structure]

[chemical structure]

[chemical structure]

[chemical structure]

[chemical structure]

[1477] Capping: In some embodiments, the capping step was carried out in two steps. In some embodiments, the above-mentioned two capping steps were combined into one and performed in one-pot. Unless otherwise specified, the two-step capping was used in the synthesis of the examples described herein.

[1478] For the two-step capping, after washing of the solid support with anhydrous ACN and drying by reverse flush with dry argon, the ‘Cap A’ reagent, typically comprising 5% Pac₂O solution in 2,6-lutidine/THF—1:4 (v/v) was first introduced to the solid support. Without the intention to be limited by theory, Cap A was sufficiently reactive to effectively cap (acylate) the free amine of the chiral auxiliary. In some embodiments, such protection prevents rearrangement/decomposition of the intermediate phosphite. Immediately following this treatment, a 1:1 mixture of ‘Cap A’ and ‘Cap B’ reagents was sent to the column containing the solid support. ‘Cap B’ was a solution of 16% N-methylimidazole (NMI) in THF which, when mixed with ‘Cap A’ effected capping of, for example, the unreacted 5′-OH oligonucleotide bound to the solid support. Not wishing to be limited by theory, the capping step was extremely important in that, without capping of the amino group of the chiral auxiliary the following sulfurization step within the cycle induced the cleavage of the internucleotidic linkage and decomposition of the oligonucleotide, for instance, due to an undesired intermolecular nucleophilic attack of the free amine of the auxiliary on the phosphorous atom. Moreover, capping of the 5′—OH groups of the run-off uncoupled solid-supported oligonucleotide shortmers is crucial in regards of obtaining high purity of the crude full-length oligonucleotide, avoiding low yields due to accumulation of extended failed sequences and tedious and difficult, if not impossible final purifications.

[1479] Sulfurization: After washing of the solid support with anhydrous ACN and drying by reverse flush with dry argon, the resulting capped phosphite triester intermediate was subject to oxidative sulfurization. A solution of sulfurizing reagent was prepared by mixing the sulfurizing reagent, for example, an alkyl thiosulfonate derivative (300 mM), with N,O-bis(trimethylsilyl)trifluoroacetamide (BSTFA) (100 mM) in ACN. This was then delivered to the column containing the solid support and allowed to react for a certain amount of time (usually 5-60 min). In some embodiments, the sulfurizing thiosulfonate reagent was used as a 300 mM solution in anhydrous ACN, without addition of BSTFA. In some embodiments, the reagent solutions with and without BSTFA produced similar results.

[1480] Oxidation: In some embodiments, oxidation to phosphodiester was performed instead of the sulfurization step. Oxidation was achieved by delivering a solution of 0.02 M 12 in a THF/pyridine/water (70:20:10—v/v/v) co-solvent system, forming a non-chiral phosphodiester linkage.

[1481] 5-Deblocking of the DMTr group: DMTr removal was effected using 3% TCA in DCM. After de-blocking, the cycle can then be carried forward for further iterative rounds of coupling, capping, sulfurization/oxidation (either sulfurization with the same sulfurizing agent, or sulfurization with a different sulfurizing agent, or oxidation instead of sulfurization, for each of the next cycles) and de-blocking. Alternatively, if the pre-designed length was reached, the oligonucleotide was subject to cycle exit and, optionally, post-synthetic treatment. In some embodiments, the oligonucleotide was removed before de-blocking of the terminal 5′-O-DMTr group.

[1482] Spontaneous Removal of Chiral Auxiliary: The spontaneous removal of chiral auxiliary was achieved during sulfurization, oxidation, de-blocking of the DMTr group, or the combination thereof. No specific step was needed to remove the chiral auxiliary.

[1483] Cleavage and Deprotection: The desired length oligonucleotide was removed from its solid support by cleaving the corresponding linker (oxalyl or succinyl linked HCP or CPG) whilst at the same time, the protecting groups on the oligonucleotide were deprotected. In some embodiments, the solid-supported oligonucleotide was first treated with an anhydrous 1 M solution of 1,5-diazabicyclo(4.3.0)non-5-ene (DBN) or 1,8-diazabicycloundec-7-ene (DBU) in dry ACN-trimethylsilyl chloride—16:1 (v/v) for 10 min at r.t. and then washed with dry ACN, as described by Reese and Yan, J. Chem. Soc., Perkin Trans. 1, 2002, 2619. In some embodiments, the material was treated with solutions of dry propylamine in dry pyridine (typically in a 1:4 ratio) for a period of 18 h at r.t. or at 60° C. for 2 h. In some embodiments, either condition afforded the crude compound with similar quality. In some embodiments, the crude oligonucleotides were cleaved from the support and deprotected by treatment with 28% aqueous ammonia for a period of 18 h at r.t. or at 60° C. for 5 h. In some embodiments, either condition afforded the crude compound with similar quality. The solvents were then evaporated and the residue was treated with ˜pH 1.5 aqueous solution (the pH may be altered if desired) with 0-50% DMSO, and the crude product was subject to analysis by a combination of HPLC and UPLC/MS. The product was purified by one of or a combination of reverse phase HPLC (RP-HPLC), normal phase HPLC, ion exchange HPLC (IE-HPLC) or size exclusion chromatography. In some embodiments, the oligonucleotide was removed from the solid support, deprotected and purified before de-blocking of the DMTr group.

### Example 1: Synthesis of Sulfurizing Reagents and Synthesis of Phosphoramidites

[1484] In some embodiments, the present invention provides sulfurizing reagents, and methods of making the same. In some embodiments, the provided sulfurizing reagents were used in the synthesis of oligonucleotides described in the present application. Exemplary sulfurizing reagents and their synthesis are illustrated in Scheme E-1 Scheme E-1. Synthesis of sulfurizing reagents.

[chemical structure]

[chemical structure]

[chemical structure]

[chemical structure]

[chemical structure]

[chemical structure]

[chemical structure]

[chemical structure]

[chemical structure]

[chemical structure]

[chemical structure]

### Synthesis of Compound 5

[chemical structure]

[1486] Compound 2: A solution of (Z)-but-2-ene-1,4-diol (0.93 ml, 11.3 mmol) and triethylamine (3.3 ml, 24 mmol) in dichloromethane (DCM, 50 mL) was added in a dropwise fashion to a stirring ice cold solution of methanesulfonyl chloride (1.9 ml, 24 mmol) in DCM (50 mL). After stirring for 0.5 h at r.t. the mixture was poured onto ice and extracted. The organic layer was collected, dried (MgSO₄) and filtered. After removal of solvent, 2.66 g compound 2 was obtained (96%), which was judged by NMR to be sufficiently pure for direct use in the next step of the reaction. ¹H NMR (399 MHz, CDCl₃) δ 5.94 (ddd, J=5.4, 4.1, 1.3 Hz, 2H), 4.83 (dd, J=4.1, 1.3 Hz, 4H), 3.04 (s, 6H); ¹³C NMR 128.34, 64.38, 38.27; MS (ESI +ve): calc (M+NH₄)⁺: 262.04, found: 262.05; R_{f}=0.3 (1:1 EtOAc/hexane).

[1487] Compound 3: A solution of sodium methanesulfonothioate (1.51 g, 11.3 mmol) in MeOH (20 ml) was treated with neat (Z)-but-2-ene-1,4-diyl dimethanesulfonate (1.25 g, 5.12 mmol) at room temperature. After 5 min, precipitation was observed to occur. After 36 h, the mixture was partitioned between water and DCM. The organic layer was separated, dried (MgSO₄), and filtered. Removal of solvent afforded colorless oil. Column chromatography (ISCO) gave pure compound 3 (0.89 g, 63%) as a colorless oil. ¹H NMR (399 MHz, CDCl₃) δ 5.84 (ddd, J=6.6, 5.1, 1.5 Hz, 2H), 3.92 (dd, J=5.1, 1.5 HZ, 4H), 3.33 (s, 6H); ¹³C NMR 128.1, 51.47, 33.13; MS (ESI +ve): calc (M+NH₄)⁺: 294.00, found: 294.04; R_{f}=0.4 (1:1 EtOAc/hexane).

[1488] Compound 4: Under argon atmosphere, morpholine (10 g, 115 mmol) was added to ethylene sulfide (15 g, 250 mmol) in a round bottom flask. The reaction was stirred for 7 hrs and was directly loaded on to a silica gel column. The column was washed with DCM first and then 2% MeOH/DCM was used to obtain compound 4 (15.3 g, 91%) as colorless oil. ¹H NMR (399 MHz, CDCl₃) δ 3.67-3.59 (m, 4H), 2.63-2.52 (m, 2H), 2.51-2.45 (m, 2H), 2.44-2.34 (m, 4H); MS (ESI +ve): calc (M+H)⁺=148.07, found: 148.1.

[1489] Compound 5: A DCM solution (1 mL) of 2-morpholinoethanethiol (0.21 g, 1.44 mmol) was added dropwise via syringe to a stirring solution compound 3 (0.40 g, 1.44 mmol) in DCM (10 mL) at room temperature. Immediately after addition, the reaction was checked by TLC, showing rapid formation of the product and some dimer. After 0.5 h, the mixture was partitioned by addition of water. Upon extraction, the organic layer was separated, dried (MgSO₄) and filtered. After removal of solvent in vacuo, column chromatography gave compound 5 (0.29 g, 58%) as colorless oil. ¹H NMR (399 MHz, CDCl₃) δ 5.78 (m, 2H), 3.92 (d, J=7.3 Hz, 2H), 3.70 (t, J=4.7 Hz, 4H), 3.46 (d, J=5.5 Hz, 2H), 3.31 (s, 3H), 2.84 (dd, J=7.8, 6.7 Hz, 2H), 2.66 (dd, J=7.8, 6.7, 2H), 2.48 (t, J=4.6 Hz, 4H); ¹³C NMR 130.35, 126.27, 66.97, 58.20, 53.67, 51.52, 36.22, 35.16, 33.67; MS (ESI +ve): calc (M+H)⁺: 344.05. found: 344.06: R_{f}=0.3 (EtOAc).

[chemical structure]

[1490] Compound 5b: A DCM solution (1 mL) of compound 4b (395 mg, 1.085 mmol) was added dropwise via syringe to a stirring DCM (15 mL) solution compound 3 (300 mg, 1.085 mmol) at r.t. After 1 h, the resulting solution was partitioned by addition of water. Upon extraction, the organic layer was separated, dried (MgSO₄) and filtered. After removal of the solvent in vacuo, column chromatography gave compound 5b as a colorless oil (0.35 g, 58%). ¹H NMR (399 MHz, CDCl₃) δ 5.83-5.70 (m, 2H), 5.35-5.21 (dt, J=26.0, 9.3 Hz, 2H), 5.16-5.07 (m, 1H), 4.59-4.54 (d, J=9.5 Hz, 1H), 4.29-4.23 (m, 1H), 4.23-4.18 (m, 1H), 3.99-3.88 (dd, J=6.7, 1.2 Hz, 2H), 3.80-3.72 (ddd, J=10.1, 4.6, 2.6 Hz, 1H), 3.64-3.56 (m, 1H), 3.50-3.43 (m, 1H), 3.31 (s, 3H), 2.09 (s, 3H), 2.03 (s, 6H), 2.00 (s, 3H); ¹³C NMR (100 MHz, CDCl₃) δ 170.68, 170.30, 169.51, 169.30, 129.43, 127.14, 87.73, 76.49, 73.89, 69.16, 67.99, 61.99, 51.64, 35.89, 33.58, 20.95, 20.80, 20.74, 20.71; MS (ESI +ve): calc (M+NH₄)⁺: 578.07, found: 577.96; R_{f}=0.5 (1:1 EtOAc/hexane).

### Synthesis of Compound 7

[chemical structure]

[1492] Compound 6: An ice cold solution of (Z)-but-2-ene-1,4-diol (0.93 ml, 11.3 mmol) and triethylamine (1.6 mL, 11.5 mmol) in DCM (50 ml) was treated dropwise via syringe with pivaloyl chloride (1.4 ml, 11.4 mmol) over 2 min. After 1 h, TLC showed good reaction results. The resulting mixture was partitioned by addition of water. Upon extraction, the organic layer was separated, dried (MgSO₄), and concentrated in vacuo. This crude compound was found: by TLC (Rf=0.6, 1:1 EtOAc/hexane) to contain no starting diol and was used crude to prepare the mesylate. The crude material was taken up in DCM (50 ml) containing triethylamine (1.7 mL, 12 mmol) and cooled on an ice bath. Methanesulfonyl chloride (0.98 ml, 12.66 mmol) was added dropwise via syringe over 2 min. TLC immediately after addition indicated complete consumption of starting material. The resulting mixture was partitioned by addition of water. Upon extraction, the organic layer was separated, dried (MgSO₄), filtered and concentrated in vacuo. Column chromatography gave pure compound 6, 1.48 g, 52%, as a colorless oil. ¹H NMR (399 MHz, CDCl₃) δ 5.89-5.75 (m, 2H), 4.89-4.84 (d, J=5.7 Hz, 2H), 4.68-4.63 (d, J=5.9 Hz, 2H), 3.03 (s, 3H), 1.19 (s, 9H); ¹³C NMR (100 MHz, CDCl₃) δ 178.28, 130.61, 126.11, 65.08, 59.65, 38.84, 38.21, 27.25; MS (ESI +ve): calc (M+NH₄)⁺: 268.12, found: 268.20; R_{f}=0.3 (20% EtOAc/hexane).

[1493] Compound 7: A MeOH (10 ml) solution of sodium methanesulfonothioate (0.63 g, 4.70 mmol) and (Z)-4-(methylsulfonyloxy)but-2-enyl pivalate (1.00 g, 4.00 mmol) was stirred at r.t. for 18 h with formation of a white precipitate (after 10 min). The resulting mixture was partitioned by addition of water and DCM. Upon extraction into DCM, the organic layer was separated, dried (MgSO₄), filtered and concentrated in vacuo. Column chromatography gave compound 7, 0.83 g, 78% as a colorless oil. ¹H NMR (399 MHz, CDCl₃) δ 5.82-5.73 (m, 2H), 4.73-4.66 (m, 2H), 3.95-3.87 (m, 2H), 3.32 (s, 3H), 1.19 (s, 9H); ¹³C NMR (100 MHz, CDCl₃) δ 178.35, 129.37, 127.32, 59.50, 51.44, 38.84, 33.61, 27.28; MS (ESI +ve): calc (M+NH₄)⁺: 284.10, found: 284.19; R_{f}=0.4 (20% EtOAc/hexane).

### Synthesis of Compound 9

[chemical structure]

[1495] Compound 9: Pivaloyl chloride (0.60 g, 5.0 mmol) was added in a dropwise fashion to a stirring solution of S-2-hydroxyethyl methanesulfonothioate (0.65 g, 4.16 mmol) in DCM (20 ml). After 2 h at r.t. the resulting mixture with white precipitate was partitioned with water. The organic layer was separated, dried (Na₂SO₄), filtered concentrated to an oil. Column chromatography gave compound 9 as a colorless oil (0.45 g, 45%). ¹H NMR (399 MHz, CDCl₃) δ 4.39-4.34 (t, J=6.3 Hz, 2H), 3.44-3.39 (t, J=6.3 Hz, 2H), 3.36 (s, 3H), 1.20 (s, 9H); ¹³C NMR (100 MHz, CDCl₃) δ 62.10, 51.11, 38.96, 35.19, 27.24; MS (ESI +ve): calc (M+NH₄)⁺: 158.08, found: 158.04; R_{f}=0.3 (20% EtOAc/hexane).

### Synthesis of Compound 12

[chemical structure]

[1497] Compound 11: Pivaloyl chloride (4.96 ml, 40.3 mmol) was added dropwise via syringe to an ice cold DCM solution (50 mL) of 2-(hydroxymethyl)phenol (5 g, 40.3 mmol) and triethylamine (5.61 ml, 40.3 mmol). An ice-cold solution of the crude pivalate ester was treated with triethylamine (6.74 ml, 48.4 mmol) and 50 mL DCM. Methanesulfonyl chloride (3.43 ml, 44.3 mmol) was then added slowly (5 min) via syringe and the resulting mixture was warmed to r.t. The mixture was poured onto ice and the organic layer was separated then washed with sat NaHCO₃(aq), dried (MgSO₄), filtered and concentrated to afford 10.5 g crude pale yellow oil. Column chromatography (ISCO) gave pure 11 5.45 g, 47%. ¹H NMR (399 MHz, CDCl₃) δ 7.53-7.46 (dd, 7.7, 1.8 Hz, 1H), 7.46-7.40 (dt, 7.7, 1.8 Hz, 1H), 7.32-7.24 (t, 7.7 Hz, 1H), 7.13-7.06 (d, 7.7 Hz, 1H), 5.21 (s, 2H), 2.79 (s, 3H), 1.40 (s, 9H); ¹³C NMR (100 MHz, CDCl₃) δ 177.05, 150.06, 131.18, 131.07, 126.35, 125.94, 123.21, 66.88, 39.48, 38.82, 27.30, 27.26. MS (ESI +ve): calc (M+NH₄)⁺: 304.12, found: 303.99; R_{f}=0.4 (20% EtOAc/hexane).

[1498] Compound 12: A MeOH (20 mL) solution of sodium methanesulfonothioate (0.825 g, 6.15 mmol) was treated with 2-((methylsulfonyloxy)methyl)phenyl pivalate (1.76 g, 6.15 mmol) at r.t. and left to stir for 18 h. The mixture was partitioned between water and DCM. The organic layer was separated, dried (MgSO₄), filtered and concentrated to afford a colorless oil. Column chromatography gave pure compound 12 as a pale colorless oil, 0.754 g, 41%. ¹H NMR (399 MHz, CDCl₃) δ 7.48-7.44 (dd, J=7.7, 1.7 Hz, 1H), 7.39-7.34 (td, J=7.8, 1.7 Hz, 1H), 7.25-7.20 (td, J=7.6, 1.2 Hz, 1H), 7.10-7.06 (dd, J=8.2, 1.2 Hz, 1H), 4.29 (s, 2H), 2.90 (s, 3H), 1.39 (s, 9H); ¹³C NMR (100 MHz, CDCl₃) δ 176.69, 149.59, 131.17, 129.85, 127.41, 126.18, 123.40, 51.43, 39.47, 36.01, 27.30; MS (ESI +ve): calc (M+NH₄)⁺: 320.10, found: 320.09; R_{f}=0.4 (20% EtOAc/hexane).

### Synthesis of Compound 14

[chemical structure]

[1500] Compound 14: Chloromethyl pivalate (0.478 ml, 3.32 mmol) was added to a stirring mixture of sodium iodide (0.050 g, 0.33 mmol) and sodium methanesulfonothioate (0.445 g, 3.32 mmol) in acetone (7 ml) at r.t. After 24 h, TLC showed good conversion to product. The solvent was removed, and the residue was partitioned between water and DCM. The organic layer was separated and dried (MgSO₄), filtered and concentrated to afford a colorless oil. Column chromatography gave pure 14 as a slightly pink solid, 0.41 g, 55%. ¹H NMR (399 MHz, CDCl₃) δ 5.67 (s, 2H), 3.39 (s, 3H), 1.24 (s, 9H); ¹³C NMR (100 MHz, CDCl₃) δ 177.35, 67.84, 52.20, 38.93, 27.05; R_{f}=0.5 (20% EtOAc/hexane).

### Synthesis of Compound 16

[chemical structure]

[1502] Compound 16: Prepared from 15 and NaMTS as described previously in U.S. Pat. No. 3,484,473. ¹H NMR (399 MHz, CDCl₃) δ 4.86 (s, 2H), 3.45 (s, 6H); ¹³C NMR (100 MHz, CDCl₃) δ 52.15, 41.50.

### Synthesis of Compounds 18 and 19

[chemical structure]

[1504] Compound 18: Prepared from 17 and NaMTS as described previously: Chem. Pharm. Bull. Vol. 12(11) p. 1271, 1964. ¹H NMR (399 MHz, CDCl₃) δ 3.55 (s, 4H), 3.40 (s, 6H); ¹³C NMR (100 MHz, CDCl₃) δ 50.67, 35.96.

[1505] Compound 19: A DCM solution (1 mL) of 2-morpholinoethanethiol (0.17 g, 1.2 mmol) was added dropwise via syringe to a stirring solution of compound 18 (300 mg, 1.2 mmol) in DCM (10 mL) at r.t. Immediately after addition, TLC showed rapid formation of product and some dimer. After 0.5 h, the mixture was partitioned by addition of NaHCO₃solution. Upon extraction, the organic layer was separated, dried (MgSO₄), filtered and concentrated in vacuo. Column chromatography gave pure 19 (0.20 g, 53%) as a colorless oil. ¹H NMR (399 MHz, CDCl₃) δ 3.73-3.67 (t, J=4.7 Hz, 4H), 3.51-3.46 (m, 2H), 3.35 (s, 3H), 3.07-3.01 (m, 2H), 2.88-2.83 (m, 2H), 2.69-2.63 (m, 2H), 2.52-2.43 (t, J=4.6 Hz, 4H); ¹³C NMR (100 MHz, CDCl₃) δ 66.96, 57.91, 53.58, 50.79, 37.66, 36.10, 35.52; MS (ESI +ve): calc (M+H)⁺: 318.03, found: 318.04; R_{f}=0.3 (EtOAc).

### Synthesis of Compound 22

[chemical structure]

[1507] Compound 21: Compound 20 was converted to compound 21 by a procedure analogous to that described for compound 11. ¹H NMR (399 MHz, CDCl₃) δ 7.45-7.36 (m, 4H), 5.37 (s, 2H), 5.21 (s, 2H), 2.93 (s, 3H), 1.21 (s, 9H); ¹³C NMR (100 MHz, CDCl₃) δ 178.20, 135.65, 131.92, 130.48, 129.98, 129.78, 128.88, 69.05, 63.39, 38.94, 38.36, 27.27; MS (ESI +ve): calc (M+NH₄)⁺: 318.24, found: 318.14; R_{f}=0.4 (20% EtOAc/hexane).

[1508] Compound 22: Compound 21 was converted to compound 22 by a procedure analogous to that described for compound 12. ¹H NMR (399 MHz, CDCl₃) δ 7.46-7.32, (m, 4H), 5.21 (s, 2H), 4.50 (s, 2H), 3.03 (s, 3H), 1.21 (s, 9H); ¹³C NMR (100 MHz, CDCl₃) δ 178.24, 135.10, 133.15, 130.93, 130.32, 129.05, 129.00, 63.61, 51.07, 38.97, 38.03, 27.30; MS (ESI +ve): calc (M+NH₄)⁺: 334.11, found: 334.13; R_{f}=0.4 (20% EtOAc/hexane).

### Synthesis of Compound 25

[chemical structure]

[1510] Compound 23: Compound 23 is prepared according to a literature method (Journal of Medicinal Chemistry, 50(23), 5568-5570, 2007).

[1511] Compound 24: An ice-cold pyridine solution (10 mL) of compound 23 (1 mmol) is treated successively, in a dropwise fashion with acetyl chloride (1 mmol), then after 5 min with MsCl (1.1 mmol). The solution is warmed to room temperature then the solvent is removed. The residue is dissolved in EtOAc, washed with water, dried (MgSO₄), filtered and concentrated in vacuo. Purification by column chromatography affords pure compound 24.

[1512] Compound 25: Compound 24 is converted to compound 25 by a procedure analogous to that described for compound 12.

### Synthesis of Compound 27

[chemical structure]

[1514] Compound 27: Compound 26 was converted to compound 27 by a procedure analogous to that described for compound 14. ¹H NMR (399 MHz, CDCl₃) δ 3.97 (s, 2H), 3.79 (s, 3H), 3.48 (s, 3H); ¹³C NMR (100 MHz, CDCl₃) δ 168.84, 53.35, 51.53, 37.83; MS (ESI +ve): calc (M+NH₄)⁺: 202.02, found: 201.96; R_{f}=0.2 (20% EtOAc/hexane).

### Synthesis of Compound 29

[chemical structure]

[1516] Compound 29: Compound 28 was converted to compound 29 by a procedure analogous to that described for compound 14. ¹H NMR (399 MHz, CDCl₃) δ 3.72 (s, 3H), 3.39 (t, J=6.8 Hz, 2H), 3.34 (s, 3H), 2.85 (t, J=6.8 Hz, 2H); ¹³C NMR (100 MHz, CDCl₃) δ 171.53, 52.29, 50.66, 34.51, 31.20; MS (ESI +ve): calc (M+NH₄)⁺: 216.10, found: 216.04; R_{f}=0.2 (20% EtOAc/hexane).

### Synthesis of Compound 31

[chemical structure]

[1518] Compound 30: Compound 30 is prepared according to a literature method (Tetrahedron, 42(2), 601-607; 1986).

[1519] Compound 31: Compound 31 is prepared from compound 30 according to a patent procedure (US 20090181444).

### Synthesis of Compound 33

[chemical structure]

[1521] Compound 33: Compound 33 is prepared from compound 32 according to a patent procedure (US 20090181444).

### Synthesis of Compound 38

[chemical structure]

[1523] Compound 36: An ice-cold DCM (20 mL) solution of compound 34 (1 mmol) is treated with NEt₃ (1 mmol) followed by the dropwise addition of TMS-Cl (1.1 mmol). After 1 h, the solution is washed with water, dried (MgSO₄), filtered and concentrated in vacuo. The crude TMS protected material is re-dissolved in THF (10 mL), whereon PPh₃ (1.2 mmol), compound 35 (1.2 mmol), then DEAD (1.2 mmol, dropwise) are added in succession. After stirring at room temperature for 18 h, the solvent is removed under vacuum, the residue is re-dissolved in DCM, the solution of which is washed with water, dried (MgSO₄), filtered and concentrated in vacuo. Purification by column chromatography affords pure compound 36.

[1524] Compound 37: A THF (10 mL) solution of compound 36 (0.5 mmol) is treated with TBAF (1 mmol of a 1M solution in THF), with monitoring by TLC. On completion of TMS cleavage, the solvent is removed under vacuum, and the residue is re-dissolved in DCM, the solution of which is washed with water, dried (MgSO₄), filtered and reduced in vacuo. The crude alcohol is re-dissolved in pyridine (5 mL), and TsCl (0.55 mmol) is added. After 18 h at room temperature, the solvent is removed, and the residue is re-dissolved in DCM, the solution of which is washed with water, dried (MgSO₄), filtered and reduced in vacuo. Purification by column chromatography affords pure compound 37.

[1525] Compound 38: Compound 37 is converted to compound 38 by a procedure analogous to that described for compound 12.

### Synthesis of Compound 41

[chemical structure]

[1527] Compound 40: An ice-cold DCM (20 mL) solution of compound 39 (1 mmol) is treated with NEt₃ (1 mmol) followed by the dropwise addition of TMS-Cl (1.1 mmol). After 1 h, the solution is washed with water, dried (MgSO₄), filtered and concentrated in vacuo. The crude TMS protected material is re-dissolved in THF (10 mL), whereon PPh₃ (1.2 mmol), potassium p-toluenethiosulfonate (KTTS, 1.2 mmol), anhydrous ZnCl₂ (1 mmol) then DEAD (1.2 mmol, dropwise) are added in succession. After stirring at r.t. for 18 h, the solvent is removed under vacuum, and the residue is re-dissolved in DCM, the solution of which is washed with water, dried (MgSO₄), filtered and concentrated in vacuo. Purification by column chromatography affords pure compound 40.

[1528] Compound 41: A THF (10 mL) solution of compound 40 (0.5 mmol) is treated with TBAF (1 mmol of a 1M solution in THF), with monitoring by TLC. On completion of TMS cleavage, the solvent is removed under vacuum, and the residue is re-dissolved in DCM, the solution of which is washed with water, dried (MgSO₄), filtered and concentrated in vacuo. The crude alcohol is re-dissolved in THF (10 mL), whereon PPh₃ (1.2 mmol), compound 35 (1.2 mmol), then DEAD (1.2 mmol, dropwise) are added in succession. After stirring at r.t. for 18 h, the solvent is removed under vacuum, and the residue is re-dissolved in DCM, the solution of which is washed with water, dried (MgSO₄), filtered and concentrated in vacuo. Purification by column chromatography affords pure compound 41.

### Synthesis of Compound 43

[chemical structure]

[1530] Compound 43: Compound 42 is converted to compound 43 by a procedure analogous to that described for compound 14.

### Synthesis of Compound 45a, 45b, 47a and 47b

[chemical structure]

[1532] Compound 45a: A mixture of 4-(2-chloroethyl)morpholine hydrochloride (compound 44) (50 g, 269 mmol), sodium iodide (4.03 g, 26.9 mmol) and potassium 4-methylbenzenesulfonothioate (73.0 g, 322 mmol) was stirred in MeOH (200 ml) and heated at 60° C. over 72 h. The pale yellow mixture was cooled and diluted with 200 mL water, stirred for 0.5 h then the white solid was collected by filtration, washed with water (100 mL), IPA (200 mL), EtOAc (200 mL) and ether (200 mL). Dried mass=68 g. This microcrystalline powder was recrystallized from 90° C. water (200 mL) and the crystalline mass was collected by filtration after standing at r.t. overnight (64 g, 71%). ¹H NMR (500 MHz, CDCl₃) δ 7.83 (d, J=8.4 Hz, 2H), 7.36 (d, J=8.4 Hz, 2H), 3.67 (t, J=4.7 Hz, 4H), 3.16 (t, J=6.9 Hz, 2H), 2.64 (t, J=6.9 Hz, 2H), 2.47 (s, 3H), 2.41 (t, J=4.4 Hz, 4H); ¹³C NMR (100 MHz, CDCl₃) δ 144.82, 141.99, 129.95, 127.14, 66.85, 56.54, 53.18, 33.44, 21.78; MS (ESI +ve): calc (M+H)⁺: 302.08, found: 302.22.

[1533] Compound 45b: Replacing potassium 4-methylbenzenesulfonothioate with potassium 4-chlorobenzenesulfonothioate compound 45b was synthesized by a method analogous to that described for compound 45a. (ESI +ve): calc (M+H)⁺: 324.03, 322.04, found: 324.22, 322.20 (³⁷Cl, ³⁵Cl isotope pattern).

[1534] Compound 47a: Replacing 4-(2-chloroethyl)morpholine hydrochloride with 4-(2-bromoethyl)-N-methylpiperazine hydrobromide (compound 46), compound 47a was synthesized by a method analogous to that described for compound 45a. MS (ESI +ve): calc (M+H)⁺: 315.12, found: 315.07.

[1535] Compound 47b: Replacing 4-(2-chloroethyl)morpholine hydrochloride with 4-(2-bromoethyl)-N-methylpiperazine hydrobromide and potassium 4-methylbenzenesulfonothioate with potassium 4-chlorobenzenesulfonothioate compound 47b is synthesized by a method analogous to that described for compound 45a.

### Synthesis of Compound 50

[chemical structure]

[1537] Compound 49: A mixture of compound 48, (500 mg, 1.894 mmol) and sodium methanesulfonothioate (534 mg, 3.98 mmol) was dissolved in acetone (10 ml) and stirred at r.t. for 4 h. TLC indicated a complete reaction. The solvent was removed then the mixture was partitioned by addition of water and DCM. Upon extraction, the organic layer was separated then dried (MgSO₄), filtered and concentrated in vacuo. Column chromatography afforded the pure product as a colorless solid (0.60 g, 97%). ¹H NMR (399 MHz, CDCl₃) δ 7.47 (dd, J=5.5, 3.5 Hz, 2H), 7.38 (dd, J=5.5, 3.5 Hz, 2H), 4.55 (s, 4H), 3.13 (s, 6H); ¹³C NMR (100 MHz, CDCl₃) δ 133.41, 131.75, 129.51, 51.02, 37.09; MS (ESI +ve): calc (M+NH₄)⁺: 344.01, found: 344.01; R_{f}=0.5 (1:1 EtOAc/hexane).

[1538] Compound 50: A DCM solution (2 mL) compound 4, (180 mg, 1.225 mmol) was added dropwise via syringe to a stirring solution of compound 49 (400 mg, 1.225 mmol) in DCM (20 mL) at r.t. After 0.5 h, the mixture was partitioned by addition of NaHCO₃. Upon extraction, the organic layer was separated then dried (MgSO₄), filtered and concentrated in vacuo. Column chromatography gave the product (170 mg, 35%) as a colorless oil. ¹H NMR (399 MHz, CDCl₃) δ 7.43-7.39 (m, 1H), 7.35-7.27 (m, 3H), 4.54 (s, 2H), 4.03 (s, 2H), 3.67 (t, J=4.6 Hz, 4H), 3.05 (s, 3H), 2.58-2.50 (m, 4H), 2.38 (t, J=4.6 Hz, 4H); ¹³C NMR (100 MHz, CDCl₃) δ 136.09, 133.20, 131.87, 131.21, 128.86, 128.54, 66.95, 57.95, 53.52, 51.04, 40.81, 38.18, 35.82; MS (ESI +ve): calc (M+H): 394.06, found: 394.23; R_{f}=0.5 (EtOAc).

### Synthesis of Compound 55

[chemical structure]

[1540] Compound 54: Bromine (0.246 ml, 4.78 mmol) in DCM (50 mL) was added in a dropwise fashion over 0.5 h to a stirring mixture of sodium 4-nitrobenzenesulfinate (2 g, 9.56 mmol) and 2-hydroxyethyl disulfide (0.585 ml, 4.78 mmol) in DCM (50 mL) at r.t. After 2 h at r.t. the mixture was filtered to remove salt. The solvent was removed then column purification by column chromatography gave the product (2.1 g, 83%) as a colorless oil. Rf=0.4 (1:1 EA/hexane. ¹H NMR (399 MHz, CDCl₃) δ 8.41 (d, J=8.8 Hz, 2H), 8.13 (d, J=8.8 Hz, 2H), 3.89 (t, J=5.8 Hz, 2H), 3.23 (t, J=5.8 Hz, 2H), 2.02-1.94 (s, br, 1H); ¹³C NMR (100 MHz, CDCl₃) δ 149.73, 128.40, 124.82, 60.94, 39.28.

[1541] Compound 55: Compound 51 (1 g, 3.07 mmol) in DCM (50 mL) was treated dropwise with oxalyl dichloride (0.527 ml, 6.15 mmol) and stirred at r.t. During the reaction a colorless homogeneous solution was formed. After 1 h at r.t. the solvent was removed under reduced pressure. The white residue (crude acid chloride, compound 52) was re-dissolved in DCM (20 mL) and added to a stirring solution of compound 54 (0.48 g, 3.1 mmol) in pyridine (20 mL). After 18 h, it was judged that the reaction was complete. The solvents were removed. The residue was re-dissolved in toluene and partitioned with water. The toluene extracts were collected, washed with brine, dried (MgSO₄), filtered and concentrated. Column chromatography afforded pure compound 55 (0.86 g, 60%) as a colorless solid. ¹H NMR (399 MHz, CDCl₃) δ 8.31 (d, J=8.9 Hz, 2H), 8.03 (d, J=8.9 Hz, 2H), 7.7 (d, J=7.5 Hz, 2H), 7.58 (d, J=7.5 Hz, 2H), 7.42 (t, J=7.5 Hz, 2H), 7.32 (dt, J=7.5, 1.2 Hz, 2H), 5.22 (s, br, 1H), 4.34 (s, br, 4H), 4.19 (t, J=6.8 Hz, 1H), 3.23 (t, J=6.0 Hz, 2H), 4.17 (s, br, 6H); ¹³C NMR (100 MHz, CDCl₃) δ 173.91, 155.10, 150.60, 149.53, 143.85, 141.42, 128.27, 128.20, 127.91, 127.22, 127.18, 125.12, 124.84, 120.17, 66.81, 62.60, 56.40, 47.25, 34.76, 25.37; MS (ESI +ve): calc (M+H)⁺: 571.11, found: 571.00; Rr=0.5 (EtOAc).

### Synthesis of Compound 59

[chemical structure]

[1543] Compound 57: Compound 57 is prepared from compound 56 (1 mmol) by reaction with 1.5 eq Fmoc-OSu in pyridine at r.t. for 18 h. Aqueous workup then column chromatography affords pure compound 57.

[1544] Compound 59: Compound 59 is prepared from compound 57 by a procedure analogous to that described for compound 55.

### Synthesis of Compound 63

[chemical structure]

[1546] Compound 61: Compound 61 is prepared from compound 60 by a procedure analogous to that described for compound 57.

[1547] Compound 63: Compound 63 is prepared from compound 61 by a procedure analogous to that described for compound 55.

### Synthesis of Compound 69

[chemical structure]

[1549] Compound 65: Ethyl isobutyrate, (11.6 g, 100 mmol) was added over 0.5 h to a cooled (−78° C.) solution of LDA in THF (53 mL, 2M). The orange mixture was then warmed to 0° C. briefly before re-cooling to −78° C. 1,2-dibromoethane (20 g, 106 mmol) was then added over 0.5 h to the solution which was warmed gradually to r.t. and stirred overnight. The resulting mixture was partitioned by addition of water and EA. Upon extraction into EA and washing with brine, the organic layer was separated then dried (MgSO₄), filtered and concentrated in vacuo. Column chromatography gave the pure product as a colorless oil (6.0 g, 25%). ¹H NMR (399 MHz, CDCl₃) δ 4.15 (q, J=7.1 Hz, 2H), 3.35 (t, J=8.4 Hz, 2H), 2.16 (t, J=8.4 Hz, 2H), 1.27 (t, J=7.1 Hz, 3H), 1.22 (s, 6H); ¹³C NMR (100 MHz, CDCl₃) δ 176.78, 60.83, 43.83, 42.89, 28.45, 25.20, 14.32; R_{f}=0.5 (5% EtOAc/hexane).

[1550] Compound 66: A mixture of compound 65 (3.4 g, 15.24 mmol) and morpholine (13.28 g, 152 mmol) in THF (20 ml) was heated at 50° C. in a glass pressure bottle over 72 h. A white precipitate was observed to form. The mixture was separated between water and EA. The EA extracts were dried (MgSO₄), filtered and concentrated. Column chromatography gave the product as a colorless liquid (3.5 g, 100%). ¹H NMR (399 MHz, CDCl₃) δ 4.11 (q, J=7.1 Hz, 2H), 3.67 (t, J=4.7 Hz, 4H), 2.41 (t, br, J=4.0 Hz, 4H), 2.30-2.26 (m, 2H), 1.74-1.70 (m, 2H), 1.23 (t, J=7.1 Hz, 3H), 1.17 (s, 6H); ¹³C NMR (100 MHz, CDCl₃) δ 177.69, 67.11, 55.15, 54.02, 41.10, 37.04, 25.49, 14.35; MS (ESI +ve): calc (M+H)⁺: 230.18, found: 230.33; Rf=0.5 (5% EtOAc/hexane).

[1551] Compound 67: Compound 66 (120 mg, 0.523 mmol) and sodium hydroxide (120 mg, 3.00 mmol) were stirred together in 1:1 EtOH/H₂O (10 mL). After 36 h, the pH of the solution was adjusted to ca. 2 by addition of c. HCI, then NEt₃ was added until the pH reached ca. 10. SiO₂ (2 g) was added and the solvents/water were evaporated. Column chromatography with dry loading (MeOH/DCM, with 2% NEt₃ in the DCM), gave the product as a partial (approx 1/3 mol eq) HNEt₃ salt. The adjusted yield was 103 mg, 84%. ¹H NMR (399 MHz, CDCl₃ plus 3 drops of DMSO-d6) δ 3.62 (t, J=4.7 Hz, 4H), 2.51-2.46 (br, 4H), 2.40 (t, J=7.1 Hz, 2H), 1.62 (J=7.1 Hz, 2H), 1.08 (s, 6H); ¹³C NMR (100 MHz, CDCl₃) δ 179.91, 65.91, 54.29, 52.87, 45.44, 41.37, 35.09, 25.93, 8.56; MS (ESI −ve): calc (M−H)⁻: 200.13, found: 200.16; Rf=0.5 (2% NEt_{3/10}% MeOH/DCM).

[1552] Compound 69a: A suspension of compound 67 (11 g, 54.9 mmol) in DCM (200 mL) was treated with oxalyl chloride (9.42 ml, 110 mmol) and stirred at r.t. During the reaction a colorless homogeneous solution was formed. After 1 h at r.t. the solvent was removed under reduced pressure. The yellow residue was suspended in a mixture of DCM (200 mL) and Py (100 mL) then S-2-hydroxyethyl compound 54 (15.91 g, 60.4 mmol) (DB-7-5) was added all at once and the reaction was monitored by HPLC/MS. After 18 h, it was judged by MS and TLC that the reaction was virtually complete. The solvents were removed then the residue was redissolved in DCM/bicarbonate. The combined organics were dried (MgSO₄), filtered and reduced. Purification by column chromatography gave 12.5 g, 51% of compound 69a as a yellow oil which crystallized on standing. ¹H NMR (399 MHz, CDCl₃) δ 8.41 (d, J=8.5 Hz, 2H), 8.13 (d, J=8.5 Hz, 2H), 4.27 (t, J=6.3 Hz, 2H), 3.65 (t, J=4.6 Hz, 4H), 3.28 (t, J=6.3 Hz, 2H), 2.40 (s, br, 4H), 2.27 (t, J=7.7 Hz, 2H), 1.71 (t, J=7.7 Hz, 2H), 1.14 (s, 6H); ¹³C NMR (100 MHz, CDCl₃) δ 177.11, 150.71, 149.69, 128.34, 124.92, 66.96, 61.66, 54.95, 53.92, 41.25, 46.81, 35.11, 25.36; MS (ESI +ve): calc (M+H)⁺: 447.12, found: 446.98.

[1553] Compound 69b: A suspension of compound 67 (128 mg, 0.636 mmol) in DCM (12 mL) was treated dropwise with oxalyl chloride (545 μl, 6.36 mmol) and stirred at r.t. During the reaction a colorless homogeneous solution was formed which soon developed a colorless precipitate. HPLC/MS indicated good conversion to acid chloride (compound 68) as shown by conversion to the N-propyl amide. The solvent was removed under reduced pressure. The white residue was cooled on an ice bath and treated with a DCM (12 mL) solution of S-2-hydroxyethyl methanesulfonothioate (compound 54) (99 mg, 0.636 mmol), followed by dropwise addition of Hunig's base (0.34 g, 2.6 mmol, 4 eq) with stirring. After 1.5 h, the solution was washed with diluted NaHCO₃(aq). The combined extracts were dried (MgSO₄), filtered and concentrated. Column chromatography gave the product as a colorless oil (84 mg, 39%). ¹H NMR (399 MHz, CDCl₃) δ 4.40 (t, J=6.2 Hz, 2H), 3.70 (t, J=4.6 Hz, 4H), 3.44 (t, J=6.2 Hz, 2H), 3.39 (s, 3H), 2.47-2.43 (br, 4H), 2.32 (t, J=7.7 Hz, 2H), 1.77 (t, J=7.7 Hz, 2H), 1.64-1.58 (br, 4H), 1.22 (s, 6H); ¹³C NMR (100 MHz, CDCl₃) δ 177.30, 67.08, 62.27, 55.03, 54.01, 51.07, 41.32, 36.99, 35.14, 25.44; MS (ESI +ve): calc (M+H)⁺: 340.13, found: 340.27; R_{f}=0.2 (EtOAc).

### Synthesis of Compound 73

[chemical structure]

[1555] Compound 70: Compound 70 was prepared by reaction of N-methyl piperazine with compound 65 by a procedure analogous to that described for compound 66. ¹H NMR (399 MHz, CDCl₃) δ 4.10 (q, J=7.1 Hz, 2H), 2.3-2.6 (br, 8H), 2.28 (t, J=8.0 Hz, 2H), 2.26 (s, 3H), 1.72 (t, J=8.0 Hz, 2H), 1.23 (t, J=7.1 Hz, 3H), 1.15 (s, 6H); ¹³C NMR (100 MHz, CDCl₃) δ 177.71, 60.44, 55.27, 54.64, 53.50, 46.18, 41.15, 37.36, 25.47, 14.34; MS (ESI +ve): calc (M+H)⁺: 243.20, found: 243.31.

[1556] Compound 71: Compound 71 was prepared by hydrolysis of compound 70 using a procedure analogous to that described for compound 67. ¹H NMR (399 MHz, CDCl₃) δ 12-10 (vbr, 1H), 3.2-2.2 (vbr, 8H), 2.44 (t, J=8.0 Hz, 2H), 2.36 (s, 3H), 1.71 (t, J=8.0 Hz, 2H), 1.17 (s, 6H), ¹³C NMR (100 MHz, CDCl₃) δ 181.36, 55.18, 53.51, 52.18, 44.31, 41.57, 37.19, 26.28; MS (ESI +ve): calc (M+H)⁺: 215.17, found: 215.19.

[1557] Compound 83: Bromine (2.58 ml, 50.0 mmol) in DCM (50 mL) was added in a dropwise fashion over 0.5 h to a stirring mixture of sodium benzenesulfinate (16.4 g, 100 mmol) and 2-hydroxyethyl disulfide (6.11 ml, 49.9 mmol) in DCM (50 mL) at r.t. After 2 h at r.t. TLC showed good reaction (Rf=0.4 (1:1 EA/hexane), so the mixture was filtered to remove salt. The solvent was removed then column chromatography gave the product (17.4 g, 80%) as a colorless oil.

[1558] Compound 73: Compound 71 (1.342 g, 6.29 mmol), in DCM (20 mL) was treated with oxalyl chloride (1.079 ml, 12.58 mmol) and stirred at r.t. During the reaction a pale yellow precipitate was observed to form. After 0.5 h at r.t. the solvent was removed under reduced pressure. The pale yellow residue was suspended in a mixture of DCM (20 mL) and Py (20 mL) then compound 83 (2.060 g, 9.44 mmol) was added all at once. After 18 h, it was judged by TLC that the reaction was complete. The solvents were removed then the residue was redissolved in water and washed with ether. The aqueous layer was reduced to a brown solid. Recrystallization from boiling EtOH (10 mL) gave a slightly impure HCI salt which was free based (NEt₃ in DCM) then loaded directly onto silica gel. Column chromatography gave 0.95 g, 36% of pure compound 73. ¹H NMR (399 MHz, CDCl₃) δ 7.96 (d, J=8.0 Hz, 2H), 7.68 (t, J=7.2 Hz, 1H), 7.59 (t, J=7.7 Hz, 2H), 4.25 (t, J=6.3 Hz, 2H), 3.25 (t, J=6.3 Hz, 2H), 2.8-2.3 (vbr, 8H), 2.36 (s, 3H), 2.33 (t, J=7.7 Hz, 2H), 1.74 (t, J=7.7 Hz, 2H), 1.16 (s, 6H); ¹³C NMR (100 MHz, CDCl₃) δ 177.13, 144.68, 134.09, 129.59, 127.09, 61.99, 54.86, 54.35, 52.84, 45.95, 45.71, 41.26, 37.05, 34.66, 25.39; MS (ESI +ve): calc (M+H)⁺: 415.17, found: 415.09.

### Synthesis of Compound 76

[chemical structure]

[1560] Compound 75: Compound 74 was converted to compound 75 by a procedure analogous to that described for compound 2. ¹H NMR (500 MHz, CDCl₃) δ 6.49-6.41 (br, d, J=6.3 Hz, 1H), 4.91 (dt, J=6.3, 2.7 Hz, 1H), 4.59 (ddd, J=31.4, 10.6, 3.0 Hz, 2H), 3.84 (s, 3H), 3.04 (s, 3H), 2.09 (s, 3H); 170.27, 169.05, 68.90, 53.33, 52.03, 37.63, 23.16; MS (ESI +ve): calc (M+H)⁺: 240.06, found: 240.24.

[1561] Compound 76: Compound 75 was converted to compound 76 by a procedure analogous to that described for compound 3. ¹H NMR (500 MHz, CDCl₃) δ 6.56-6.40 (br, d, J=6.2 Hz, 1H), 4.93 (q, J=5.9 Hz, 1H), 3.81 (s, 3H), 4 3.74 (dd, J=14.6, 4.8 Hz, 1H), 3.57 (dd, J=14.6, 5.6 Hz, 1H), 3.38 (s, 3H), 2.07 (s, 3H); ¹³C NMR (126 MHz, CDCl₃) δ 170.44, 170.19, 53.23, 52.02, 50.73, 37.77, 23.12; MS (ESI +ve): calc (M+H)⁺: 256.03, found: 256.21.

### Synthesis of Compound 78

[chemical structure]

[1563] A mixture of compound 77, (2.49 ml, 32.8 mmol), and sodium methanesulfonothioate (4.4 g, 32.8 mmol) was stirred in acetone (80 ml) over 6 h. The acetone was removed by rotary evaporation and the mixture was triturated with DCM. After filtration, DCM was removed by evaporation (5 g crude yield) and the mixture was subjected to purification by column chromatography. Yield of pure compound 78 was 2.8 g, 55%, colorless oil, Rf=0.3 (20% EA/hexane). ¹H NMR (500 MHz, CDCl₃) δ 5.30 (s, 2H), 3.48 (s, 3H), 3.38 (s, 3H); ¹³C NMR (126 MHz, CDCl₃) δ 80.07, 57.40, 22.71.

### Synthesis of Compound 80

[chemical structure]

[1565] An ice-cold solution of compound 79 (5 g, 65.7 mmol) and triethylamine (11 ml, 79 mmol) in DCM (150 mL) was treated with methanesulfonyl chloride (5.59 ml, 72.3 mmol) over 2 min. After 1 h the reaction was judged to be complete by TLC. Water was added and the organic extracts were washed sequentially with dilute HCI, saturated sodium bicarbonate, brine, then dried (MgSO₄), filtered and reduced. The product mesylate (9.4 g, 61 mmol, 96%) was taken up in acetone (200 ml), then the potassium salt of toluene thiosulfonic acid (61 mmol) was added and the solution was stirred at 50° C. over 18 h. A thick white precipitate was observed to form. The mixture was filtered, reduced to an oil then extracted into DCM/water. The organic extracts were dried (MgSO₄), filtered and reduced. Column chromatography gave pure compound 80 as a colorless oil which crystallized on standing Rf=0.3 (20% EA/hexane)

### Synthesis of Compound 82

[chemical structure]

[1567] A mixture of 2-chloro-N,N-dimethylethanamine hydrochloride (10 g, 69.4 mmol), sodium iodide (1.041 g, 6.94 mmol) and potassium 4-methylbenzenesulfonothioate (18.86 g, 83 mmol) was stirred in MeOH (50 ml) and heated at 60° C. over 72 h. Aqueous workup then column chromatography gave pure compound 82 (8.5 g, 47%) as a colorless oil. ¹H NMR (399 MHz, CDCl₃) δ 7.81 (d, J=8.4 Hz, 2H), 7.33 (dd, J=8.4, 0.6 Hz, 2H), 3.09 (t, J=6.8 Hz, 2H), 2.53 (t, J=6.8 Hz, 2H), 2.44 (s, 3H), 2.17 (s, 6H); ¹³C NMR (100 MHz, CDCl₃) δ 144.76, 142.03, 129.92, 127.18, 57.51, 45.14, 34.29, 21.77; MS (ESI +ve): calc (M+H)⁺: 260.07, found: 260.16.

### Synthesis of Compound 85

[chemical structure]

[1569] Sodium methanesulfonate (11.5 g, 86 mmol) was placed in a dry 50 mL one neck flask. 30 mL of anhydrous DMF (Aldrich) was added using a dry glass syringe. 5 mL of 3-bromopropionitrile (compound 84) (8.2 g, 61.2 mmol) was added using a dry glass syringe. The reaction flask was closed under argon, sealed and stirred for 24 h at 50° C. The reaction was monitored using TLC (system: hexanes/ethyl acetate—5:5—v/v). The reaction mixture was diluted with 100 mL of ethyl acetate and washed 5 times with water (5×100 mL). The organic layers were dried over sodium sulfate, filtered and evaporated to dryness. The residue was dissolved in 5 mL of dichloromethane and purified by silica gel chromatography (CombiFlash) using a linear gradient of ethyl acetate in hexanes. Pure compound 85 (7.2 g, 52%) was obtained as a colorless oil. ¹H-NMR (CDCl₃, 399 MHz). δ 3.43 (s, 3H), 3.41 (t, 2H, J=2.5 Hz), 2.93 (t, 2H, J=2.5 Hz); ¹³C-NMR (CDCl₃, 100 MHz) δ 117.7, 51.2, 31.7, 19.6.

### Synthesis of Compound 87

[chemical structure]

[1571] Compound 87: Compound 86 (1.11 mL, 12.5 mmol) and sodium 4-nitrobenzenesulfinate (5.23 g, 25.0 mmol) were added in DCM (12.5 mL) to give a white suspension. Dibromine (0.64 ml, 12.5 mmol) was added to the stirred solution. The solution was stirred for 30 min at r.t. and filtrated to remove the salt, then the filtrate was evaporated under reduced pressure. The crude product was added to a silica gel column and was eluted with hexane-EtOAc to give pure compound 87 (4.80 g, 20.6 mmol, 82% yield). ¹H NMR (399 MHz, CDCl₃) δ 8.44-8.40 (m, 2H), 8.15-8.10 (m, 2H), 2.58 (s, 3H); ¹³C NMR (100 MHz, CDCl₃) δ 149.00, 128.54, 124.87, 94.61, 18.55; Rf=0.60 (1:1 EtOAc/hexane).

### Synthesis of Compound 90

[chemical structure]

[1573] Compound 89: In a 1 L round-bottomed flask N-(2-mercaptoethyl)acetamide, 88 (11.92 g, 100 mmol) was dissolved in EtOAc (300 mL) to give a colorless solution. Sodium iodide (0.150 g, 1.000 mmol) and 30% hydrogen peroxide (3.40 g, 100 mmol) in H₂O (11.3 mL) were added to the solution which was stirred for 45 min at r.t. Saturated Na₂S₂O₃ was added to the solution. The aqueous layer was extracted with EtOAc (3×300 mL). The combined organic layers were dried with Na₂SO₄, filtered and concentrated by rotary evaporation. The crude product was subjected to column chromatography and was eluted with a MeOH/DCM gradient to give pure compound 89 (4.94 g, 20.90 mmol, 41.8% yield), which was judged by TLC to be sufficiently pure for direct use in the next step of the reaction. Rf=0.35 (9:1 DCM/Methanol)

[1574] Compound 90: In a 100 mL round-bottomed flask, compound 89 (2.364 g, 10.00 mmol) and sodium 4-nitrobenzenesulfinate (4.18 g, 20 mmol) were dissolved in CH₂Cl₂ (20 mL) to give a white suspension. Dibromine (0.516 ml, 10.00 mmol) was added to the stirred solution. The solution was stirred for 30 min at r.t. and filtrated to remove the salt, then the filtrate was evaporated under reduced pressure. The crude product was added to a silica gel column and was eluted with hexane-EtOAc to give pure compound 90 (2.37 g, 7.79 mmol, 39% yield). ¹H NMR (399 MHz, CDCl₃) δ 8.45-8.40 (m, 2H), 8.17-8.12 (m, 2H), 3.60-3.54 (dt, 2H), 3.21-3.16 (t, 2H), 2.00 (s, 3H); ¹³C NMR (100 MHz, CDCl₃) δ 130.35, 126.27, 66.97, 58.20, 53.67, 51.52, 36.22, 35.16, 33.67; Rf=0.40 (EtOAc).

### Synthesis of Compounds 93 and 94

[chemical structure]

[1576] Compound 92: In a 250 mL round-bottomed flask, sodium 4-chlorobenzenesulfonothioate (14.5 g, 63.0 mmol) was dissolved in MeOH. Cis-1,4-dichloro-2-butene, 91 (3.16 g, 30.0 mmol) and sodium iodide (450 mg, 3.0 mmol) was added to the stirred solution. The solution was stirred for 3 h at r.t., then heated up to 50° C. After stirring for 18 h at 50° C., solvents were removed under reduced pressure. The resulting crude material was diluted with DCM (300 mL) and washed with water (1×100 mL). The aqueous layer was extracted with DCM (1×100 mL). Combined organic layers were dried with Na₂SO₄, filtered and concentrated. The crude product was subjected to column chromatography and was eluted with an EtOAc/hexane gradient to give compound 92 (5.99 g, 12.8 mmol, 43% yield). ¹H NMR (399 MHz, CDCl₃) δ 7.87-7.84 (m, 4H), 7.56-7.51 (m, 4H), 5.56-5.50 (m, 2H), 3.72-3.68 (m, 4H); ¹³C NMR (100 MHz, CDCl₃) 130.35, 126.27, 66.97, 58.20, 53.67, 51.52, 36.22, 35.16, 33.67; Rf=0.35 (1:3 EtOAc/hexane).

[1577] Compound 93: In a 100 mL round-bottomed flask compound 92 (3.09 g, 6.58 mmol) was dissolved in THF at 0° C. Triethylamine (459 μL, 3.29 mmol) and 2-methyl-2-propanethiol (742 μL, 6.58 mmol) were added to the stirred solution at 0° C. The solution was stirred for 20 min at 0° C., then triethylamine (230 μL, 1.65 mmol) was added to the stirred solution at 0° C. After stirring for 40 min at 0° C., the solvents were removed under reduced pressure. The resultant was subjected to column chromatography and was eluted with an EtOAc/hexane gradient to give compound 93 (1.77 g, 4.62 mmol, 70% yield). ¹H NMR (399 MHz, CDCl₃) δ 7.90-7.85 (m, 2H), 7.56-7.52 (m, 2H), 5.73-5.65 (m, 1H), 5.55-5.48 (m, 1H), 3.78-3.75 (d, 2H), 3.36-3.32 (d, 2H), 1.32 (s, 9H); ¹³C NMR (100 MHz, CDCl₃) δ 143.54, 140.60, 130.90, 129.83, 128.66, 124.56, 48.29, 37.05, 33.35, 30.16; Rf=0.60 (1:3 EtOAc/hexane).

[1578] Compound 94: Using a procedure analogous to that described for compound 93, and substituting 2-propanethiol for 2-methyl-2-propanethiol, pure compound 94 was obtained (1.13 g, 3.06 mmol, 72% yield). ¹H NMR (399 MHz, CDCl₃) δ 7.90-7.82 (m, 2H), 7.56-7.48 (m, 2H), 5.72-5.64 (m, 1H), 5.57-5.47 (m, 1H), 3.79-3.72 (d, 2H), 3.33-3.26 (d, 2H), 3.61-2.92 (m, 1H), 1.27 (d, 6H); ¹³C NMR (100 MHz, CDCl₃) δ 143.28, 140.36, 131.37, 125.63, 124.55, 124.56, 41.32, 38.02, 35.81, 33.08, 22.54; Rf=0.55 (1:3 EtOAc/hexane).

### Synthesis of Compound 96

[chemical structure]

[1580] Compound 96: Compounds 9 (1.81 g, 5.50 mmol) and 54 (2.17 g, 8.25 mmol) were combined and dried by co-evaporation with anhydrous toluene (3×2 mL). The mixture was dissolved in dry 1,2-dichloroethane (16.5 mL). 4 A molecular sieves were added to the solution and the mixture was stirred 30 min at r.t. Trimethylsilyltriflate (497 μL, 2.75 mmol) was added to the stirred solution. The solution was stirred for 9 h at r.t., then additional 54 (0.723 g, 2.75 mmol) was added to the stirred solution. After stirring 16 h at r.t., the solution was diluted with DCM (100 mL) and washed with sat. NaHCO₃ (1×100 mL). The aqueous layer was extracted with DCM (1×50 mL). The combined organic layers were dried with Na₂SO₄, filtered and concentrated by rotary evaporation. The resulting crude was subjected to column chromatography and was eluted with an EtOAc/hexane gradient to give compound % (2.21 g, 3.73 mmol, 68% yield). ¹H NMR (399 MHz, CDCl₃) δ 8.42-8.36 (d, 2H), 8.12-8.06 (d, 2H), 6.07-6.00 (d, 1H), 5.33-5.30 (d, 1H), 5.23-5.15 (dd, 1H), 4.69-4.63 (d, 1H), 4.15-4.04 (m, 3H), 4.04-3.87 (m, 2H), 3.84-3.73 (m, 1H), 3.22-3.12 (t, 2H), 2.12-1.92 (m, 12H); ¹³C NMR (100 MHz, CDCl₃) 179.95, 170.74, 170.48, 150.77, 149.59, 128.47, 125.03, 101.40, 71.08, 70.02, 67.39, 66.92, 61.76, 51.12, 36.51, 23.72, 20.92; Rf=0.25 (1:9 MeOH/DCM).

### Synthesis of Compound 100

[chemical structure]

[1582] Compound 98: An ice-cold solution of compound 97 (4.87 g, 22.0 mmol) in dry pyridine (70 mL) was treated with phenoxyacetic anhydride (37.8 g, 132.0 mmol) and 4-dimethylaminopyridine (26.9 mg, 220 μmol). After stirring at r.t. for 12 h, the mixture was concentrated and co-evaporated with toluene in vacuo. The resultant was diluted by DCM (400 mL) and washed with sat. NaHCO₃ (1×400 mL). Upon extraction, the organic layer was separated, dried with Na₂SO₄, filtered and concentrated in vacuo. The resultant was subjected to column chromatography and was eluted with an EtOAc/hexane gradient to give pure compound 98 (16.7 g, 22.0 mmol, 100% yield). ¹H NMR (399 MHz, CDCl₃) δ 7.36-6.75 (m, 20H), 6.27-6.20 (d, 1H), 5.43-5.36 (m, 1H), 5.22-5.06 (m, 2H), 4.81-4.65 (m, 3H), 4.60-4.52 (m, 2H), 4.45-4.29 (m, 2H), 4.17-4.02 (m, 2H), 3.97-3.87 (m, 1H), 1.85 and 1.74 (d, 3H, rotamers); ¹³C NMR (100 MHz, CDCl₃) δ 170.20, 168.78, 168.70, 168.36, 167.52, 157.56, 157.48, 157.40, 130.09, 129.70, 129.66, 129.60, 122.32, 122.01, 121.94, 114.61, 114.58, 114.58, 114.39, 91.93, 68.37, 68.25, 67.30, 64.54, 61.25, 46.43, 22.95; Rf=0.35 (1:1 EtOAc/hexane).

[1583] Compound 99: Compound 98 (15.15 g, 20.0 mmol) was dissolved in ClCH₂CH₂Cl (40 mL) and trimethylsilyl trifluoromethanesulfonate (5.43 mL, 30.0 mmol) was added to the stirred solution at r.t. The solution was stirred for 24 h at 50° C., triethylamine (12.6 mL, 90.0 mmol) was added and the mixture was concentrated in vacuo. The resultant was purified by silica gel column chromatography (EtOAc (2.5% Et₃N)-hexane) to give slightly impure compound 99 containing tiny amounts of phenoxyacetic acid. This material was used in the next step of the reaction scheme without further purification.

[1584] Compound 100: Compound 99 (3.63 g, 6 mmol) and S-2-hydroxyethyl-4-nitrobenzenesulfonothioate, 54 (2.76 g, 10.5 mmol) were dissolved in ClCH₂CH₂Cl (18 mL) to give a colorless solution. 4 Å Molecular sieves were added to the stirred solution at r.t. The solution was stirred at r.t. for 30 min then trimethylsilyl trifluoromethanesulfonate (0.543 ml, 3.00 mmol) was added. The mixture was stirred at r.t. for 24 h and TLC showed about 90% reaction completed. Additional 54 (237.0 mg, 0.90 mmol) was added to the mixture and it was stirred for further 36 h to complete the reaction. The mixture was diluted with DCM (100 mL) and washed with sat NaHCO₃ (1×100 mL). The aqueous layer was back-extracted with CH₂Cl₂ (1×50 mL). The combined organic layers were dried with Na₂SO₄, filtered, concentrated and dissolved in 120 mL of Ac₂O-pyridine (1:9, v/v). The mixture was stirred for 12 h then concentrated under reduced pressure. The resultant was diluted with CH₂Cl₂ (100 mL) and washed with sat NaHCO₃ (1×100 mL). The aqueous layer was back extracted with CH₂Cl₂ (1×50 mL). The combined organic layers were dried with Na₂SO₄, filtered and concentrated. The resultant was purified by silica gel column chromatography (EtOAc-hexane gradient) to give pure compound 100 (2.56 g, 2.94 mmol, 49.0% yield). ¹H NMR (399 MHz, CDCl₃) δ 8.70-8.62 (d, 2H), 8.41-8.33 (d, 2H), 7.65-7.03 (m, 15H), 6.35-6.27 (d, 1H), 5.81-5.72 (m, 2H), 5.06-4.97 (m, 3H), 4.92-4.85 (m, 2H), 4.83-4.62 (m, 2H), 4.58-4.44 (m, 2H), 4.34-4.26 (m, 2H), 4.26-4.15 (m, 1H), 4.06-3.95 (m, 1H), 3.51-3.40 (m, 2H), 2.22 and 2.18 (d, 3H, rotamers); ¹³C NMR (100 MHz, CDCl₃) δ 171.17, 169.13, 169.05, 168.92, 157.86, 157.80, 157.76, 150.82, 149.63, 130.01, 129.96, 128.47, 125.06, 122.27, 122.23, 114.93, 114.74, 100.86, 70.64, 70.54, 65.36, 64.90, 62.21, 51.30, 36.54, 23.74; Rf=0.60 (1:1 EtOAc/hexane).

### Synthesis of Compound 104

[chemical structure]

[1586] Compound 102: Using a procedure analogous to that described for compound 98, and substituting compound 101 for compound 97, pure compound 102 is obtained.

[1587] Compound 103 Using a procedure analogous to that described for compound 99, and substituting compound 102 for compound 98, pure compound 103 is obtained.

[1588] Compound 104 Using a procedure analogous to that described for compound 100, and substituting compound 103 for compound 99, pure compound 103 is obtained.

### Synthesis of Compounds 109 and 111

[chemical structure]

[1590] Compound 106: A solution of compound 105 (100 mmol) in dry 1,2-dichloroethane (300 mL) is treated dropwise via syringe with TiCl₄ (110 mmol) over 2 min. After refluxing for 16 h, TLC shows complete reaction. The crude is diluted with DCM and washed with sat. NaHCO₃. The combined organic layers are dried with Na₂SO₄, filtered, concentrated and used for next reaction without further purification.

[1591] Compound 107: Thiourea (150 mmol) and compound 106 (100 mmol) are dissolved in acetone (200 mL) under Ar. The reaction mixture is heated to 60° C. and stirred. After 2 h, a white solid precipitation is removed by filtration. The precipitate is recrystallized. The filtered crystals and Na₂S20s (140 mmol) are added to a stirred mixture of DCM (500 mL) and H₂O (250 mL). The reaction mixture is heated to reflux under Ar. After 3 h, the reaction mixture is cooled to r.t. and the phases are separated. The aqueous layer is back extracted with DCM. The combined organic layers are dried over Na₂SO₄, filtered and concentrated to give compound 107.

[1592] Compound 108: 1-Bromo-2-chloroethane (100 mmol), triethylamine (200 mmol) and compound 107 (100 mmol) are dissolved in acetonitrile (200 mL) under Ar. The reaction mixture is heated to 60° C. and stirred. TLC shows completed reaction. The mixture is diluted with DCM (500 mL) and washed with NaHCO₃ (250 mL). The organic layer is dried over Na₂SO₄, filtered, concentrated and purified to give compound 108.

[1593] Compound 109: compound 112 (120 mmol), sodium iodide (10.0 mmol) and compound 108 (100 mmol) are dissolved in MeOH (200 mL) under Ar. The reaction mixture is heated to 60° C. and stirred. TLC shows completed reaction. The mixture is diluted with DCM (500 mL) and washed with NaHCO₃ (250 mL). The organic layer is dried over Na₂SO₄, filtered, concentrated and purified to give compound 109.

[1594] Compound 110: 1-Bromo-4-chloro-2,3-cis-butene (100 mmol), triethylamine (200 mmol) and compound 107 (100 mmol) are dissolved in acetonitrile (200 mL) under Ar. The reaction mixture is heated to 60° C. TLC shows reaction is completed. The mixture is diluted with DCM (500 mL) and washed with NaHCO₃ (250 mL). The organic layer is dried over Na₂SO₄, filtered, concentrated and purified to give compound 110.

[1595] Compound 111: compound 112 (120 mmol), sodium iodide (10.0 mmol) and compound 110 (100 mmol) are dissolved in MeOH (200 mL) under Ar. The reaction mixture is heated to 60° C. TLC shows completed reaction. The mixture is diluted with DCM (500 mL) and washed with NaHCO₃ (250 mL). The organic layer is dried over Na₂SO₄, filtered, concentrated and purified to give compound 111.

### Synthesis of Compound 115

[chemical structure]

[1597] Compound 113: 2-Chlorosulfonylacetonitrile (113) is prepared following the procedure of Sammes (as described in patent GB1252903).

[1598] Compound 114: Sodium sulfide nonahydrate (65 mmol) is taken up in 100 mL water. The flask is kept in a water bath. Compound 113 (50 mmol) is added dropwise to the solution while stirring and gently warming the water bath. Sulfur is observed to appear and then disappear in the flask. Solvent is evaporated under vacuum and the residue is recrystallized from ethanol. Sodium cyanomethanesulfonothioate (compound 114) is thus obtained as a colorless crystalline solid.

[1599] Compound 115: Compound 114 (13.69 g, 86 mmol) is taken up, with stirring, in anhydrous DMF (30 mL) in a 100 mL round bottom flask. Then, 3-bromopropionitrile (5 mL, 8.2 g, 61.2 mmol) is added and the resulting mixture is stirred for 18 h at 50° C. with monitoring by TLC. On completion of reaction (complete consumption of 3-bromopropionitrile), the reaction mixture is diluted with EtOAc (100 mL) and the organic layer is washed with 5×20 mL H₂O. The organic separated organic layer is then dried (MgSO₄), filtered and reduced to an oil by rotary evaporation. The crude oil is purified by column chromatography using an EtOAc/hexane gradient and the fractions containing pure material are collected and the solvent is removed by rotary evaporation then further drying in vacuo to furnish the pure compound 115 as a colorless oil.

### Synthesis of compound 118

[chemical structure]

[1601] Compound 116: Compound 51 (2.9 g, 8.91 mmol) in DCM (50 mL) was treated dropwise with oxalyl dichloride (0.53 ml, 6.15 mmol) then DMF (10 μL) and stirred at r.t. During the reaction a colorless homogeneous solution was formed. After 2 h at r.t. the solvent was removed under reduced pressure. The white residue was redissolved in DCM (20 mL) then added dropwise to a stirring pyridine (10 mL) solution of ethane-1,2-dithiol (8.40 g, 89 mmol), with monitoring by UPLC/MS. After 18 h, it was judged that the reaction was complete. The solvents were removed and the remaining ethanethiol was removed by trap-to-trap distillation then the residue was subjected to purification by column chromatography with DCM to provide the pure compound 116 as a colorless solid. Yield was 1.82 g, 51%. MS (ESI +): calc (M+Na)⁺: 424.10, found: 424.06. ¹H NMR (500 MHz, CDCl₃) δ 7.79 (d, J=7.5 Hz, 2H), 7.63 (d, J=5.7 Hz, 2H), 7.43 (t, J=7.5 Hz, 2H), 7.34 (t, J=7.4 Hz, 2H), 5.40-5.15 (br, 1H), 4.60-4.35 (br, 2H), 4.31-4.19 (m, 1H), 3.15-3.04 (br, 2H), 2.95-2.80 (m, 1H), 2.75-2.60 (br, 2H), 1.72-1.43 (m, 6H); ¹³C NMR (126 MHz, CDCl₃) δ 203.14, 154.75, 143.92, 141.49, 127.84, 127.19, 125.17, 120.13, 66.81, 62.69, 47.41, 33.01, 25.78, 24.60.

[1602] Compound 117: To a stirred solution of compound 116 (1.7 g, 4.23 mmol) in EtOAc (12 mL) was added sodium iodide (6.35 mg, 0.042 mmol) and hydrogen peroxide (0.144 g, 4.23 mmol) (0.45 mL of a 30% aqueous solution) and the mixture was stirred at r.t. for 15 min. TLC showed complete consumption of the starting material. Aqueous sodium thiosulfate was added until the solution became colorless. The solution was washed with water, dried (MgSO₄), then column chromatography (EtOAc/hexane), gave pure compound 117 as a colorless solid foam (1.45 g, 86%). MS (ESI +): calc (M+H)⁺: 802.07, found: 802.08. ¹H NMR (500 MHz, CDCl₃) δ 7.78 (d, J=7.6 Hz, 4H), 7.63 (d, J=5.8 Hz, 4H), 7.42 (t, J=7.5 Hz, 4H), 7.33 (t, J=7.5 Hz, 4H), 5.42-5.25 (br, 2H), 4.55-4.35 (br, 4H), 4.30-4.18 (br, 2H), 3.25-3.10 (br, 4H), 2.95-2.70 (br, 4H), 1.65-1.45 (br, 12H); ¹³C NMR (126 MHz, CDCl₃) δ 203.19, 154.71, 143.90, 141.45, 127.80, 127.17, 125.16, 120.10, 66.76, 62.65, 47.37, 37.90, 28.56, 25.73.

[1603] Compound 118: Dibromine (0.091 ml, 1.77 mmol) was added in a dropwise fashion over 2 min to a stirring mixture of sodium 4-nitrobenzenesulfinate (0.742 g, 3.55 mmol) and compound 117 (1.42 g, 1.773 mmol) in DCM (10 mL) at r.t. After 30 min stirring at r.t., the mixture was filtered and the filtrate was reduced to an orange solid foam in vacuo. Column chromatography (DCM/hexane) gave pure compound 118 (1.26 g, 60%) as a pale yellow solid foam. MS (ESI +): calc (M+H)⁺: 587.71, found: 802.08. ¹H NMR (500 MHz, CDCl₃) δ 8.36 (d, J=8.2 Hz, 2H), 8.14 (d, J=7.3 Hz, 2H), 7.79 (d, J=7.0 Hz, 2H), 7.63 (s, 2H), 7.43 (t, J=6.7 Hz, 2H), 7.35 (d, J=6.8 Hz, 2H), 5.35-5.15 (br, 1H), 4.55-4.35 (br, 2H), 4.30-4.20 (br, 1H), 3.30-3.00 (br, 4H), 1.70-1.25 (br, 6H); ¹³C NMR (126 MHz, CDCl₃) δ 202.71, 154.66, 150.60, 149.63, 143.78, 141.46, 128.40, 127.91, 127.21, 125.12, 124.81, 120.18, 66.86, 62.59, 47.35, 35.84, 28.42, 25.61.

### Synthesis of compound 120

[chemical structure]

[1605] Compound 120: Commercially available compound 119 (1 g, 7.04 mmol) and potassium 4-methylbenzenesulfonothioate (1.753 g, 7.75 mmol) were stirred in MeOH (10 mL) over 5 days at r.t. then at 40° C. over 24 h. TLC showed good conversion to product. The MeOH was evaporated and the residue was taken up in DCM (30 mL) and Boc₂O (1.54 g, 7.04 mmol) was added. The mixture was treated with triethylamine (1.030 ml, 7.39 mmol) in a dropwise fashion over 10 min at r.t. until the solution became practically homogeneous. Washing with water (50 mL), drying (MgSO₄), filtration and evaporation gave the crude product which was further purified by column chromatography to give pure compound 120 (1.64 g, 65%) as a colorless solid. MS (ESI +): calc (M+Na)*: 380.10, found: 380.11. ¹H NMR (399 MHz, CDCl₃) δ 7.80 (d, J=8.2 Hz, 2H), 7.34 (dd, J=8.5, 0.8 Hz, 2H), 5.54 (ddt, J=24.7, 16.6, 7.9 Hz, 2H), 4.65 (s, 1H), 3.77-3.66 (m, 4H), 2.45 (s, 3H), 1.43 (s, 9H); ¹³C NMR (100 MHz, CDCl₃) δ 155.83, 145.05, 142.06, 131.80, 130.01, 127.15, 124.55, 79.72, 37.29, 32.75, 28.51, 21.79.

### Synthesis of Compound 122

[chemical structure]

[1607] Compound 122: A solution of commercially available compound 121 (1 g, 3.59 mmol) in water (1 mL) was treated all at once with a solution of potassium hexafluorophosphate (0.662 g, 3.59 mmol) in water (10 mL) and agitated by shaking at r.t. for 5 min. The resulting solid was collected by filtration, washed with 2×3 mL water and dried in vacuo over KOH to give pure compound 122 as a colorless solid (1.01 g, 82%). ¹H NMR (300 MHz, CD₃CN) δ 3.67-3.60 (m, 2H), 3.49 (s, 3H), 3.53-3.45 (m, 2H), 3.10 (s, 9H); ¹³C NMR (126 MHz, CD₃CN) 6 65.98, 54.05 (q, J=4.1 Hz), 51.11, 28.99; ¹⁹F NMR (376 MHz, CD₃CN) 8-73.15 (d, J=706.5 Hz); ³¹P NMR (162 MHz, CD₃CN) 6-143.50 (hept, J=706.6 Hz).

### Synthesis of Compound 125

[chemical structure]

[1609] Compound 124: A DMF (50 mL) solution of commercially available compound 123 (10 mmol) is treated successively with tert-butyl-2-aminoacetate (22 mmol), di-isopropylethylamine (50 mmol) and HBTU (24 mmol). After 1 h stirring at r.t., water (100 mL) is added and the resulting solution is extracted with EtOAc (2×50 mL) and washed with 5% NaHCO₃ (2×25 mL) then dilute brine (2×25 mL), dried (MgSO₄), filtered and reduced by rotary evaporation. Purification by column chromatography provides the pure compound 124.

[1610] Compound 125: Dibromine (0.091 ml, 1.77 mmol) is added in a dropwise fashion over 2 min to a stirring mixture of sodium 4-nitrobenzenesulfinate (0.742 g, 3.55 mmol) and di-tert-butyl-2,2′-((4,4′-disulfanediyl-bis(butanoyl))bis(azanediyl))diacetate (824 mg, 1.77 mmol) in DCM (10 mL) at r.t. After 30 min stirring at r.t., the mixture is filtered and the filtrate is reduced to a solid foam in vacuo. Column chromatography gives the pure product as a solid foam.

### Synthesis of Compound 129

[chemical structure]

[1612] Compound 127: A solution of ethane-1,2-dithiol (1.130 g, 12 mmol) in TFA (10 mL) was treated all at once with commercially available compound 126 (0.89 g, 9.99 mmol). The solution became warm. After 1 h stirring at r.t. the volatiles were removed and the residue was subjected to column chromatography to give pure compound 127 as a colorless oil (0.95 g, 48%). Rf=0.6 (5% MeOH/DCM); ¹H NMR (500 MHz, CDCl₃) δ 6.09-5.93 (br, 1H), 4.41 (d, J=6.4 Hz, 2H), 2.87-2.83 (m, 2H), 2.79 (ddd, J=9.7, 7.3, 3.5 Hz, 2H), 2.04 (s, 3H), 1.71 (t, J=8.0 Hz, 1H); ¹³C NMR (126 MHz, CDCl₃) δ 170.25, 40.89, 35.22, 24.91, 23.44.

[1613] Compound 129: A warm (35° C.) DMF (10 mL) solution of commercially available compound 128 (939 mg, 3.0 mmol) was treated in a dropwise fashion over 5 min with a DCM (5 mL) solution of compound 127 (250 mg, 1.513 mmol). After checking TLC, the solvents were removed by rotary evaporation under high vacuum then the residue was triturated with DCM (50 mL), filtered, and the filtrate was washed with 5×5% NaHCO₃, then was dried (MgSO₄), filtered and reduced to a pale yellow solid. Column chromatography gave pure compound 129 as a pale yellow solid. MS (ESI +): calc (M+H)⁺: 320.02, found: 320.34; ¹H NMR (500 MHz, CDCl₃) δ 9.28 (dd, J=2.7, 0.7 Hz, 1H), 8.43 (dd, J=8.9, 2.6 Hz, 1H), 7.93 (dd, J=8.9, 0.7 Hz, 1H), 6.10-5.90 (br, 1H), 4.41 (d, J=6.5 Hz, 2H), 3.13 (dd, J=8.6, 6.3 Hz, 2H), 2.93 (dd, J=8.6, 6.4 Hz, 2H), 2.00 (s, 3H); ¹³C NMR (126 MHz, CDCl₃) δ 170.18, 168.57, 145.22, 142.22, 131.81, 119.59, 40.65, 38.59, 30.07, 23.39.

### Synthesis of Compound 134

[chemical structure]

[1615] Compound 130: Compound 130 is prepared by a previously described method (Heterocycles, Vol 54, p 139, 2001).

[1616] Compound 132: Using an analogous procedure described previously for the synthesis of compound 126 (Organic Syntheses, Coll. Vol. 6, p. 5 (1988)), compound 131 (Tetrahedron Letters, 48(39), 7038-7041; 2007) is converted to compound 132 by gently heating in the presence of an aqueous formaldehyde solution containing K₂CO₃.

[1617] Compound 133: Using a procedure analogous to that described for the synthesis of compound 127 and substituting compound 132 for compound 126 and compound 130 for ethane-1,2-dithiol, pure compound 133 is thus obtained.

[1618] Compound 134: Using a procedure analogous to that described for the synthesis of compound 129 and substituting compound 133 for compound 127, pure compound 134 is thus obtained.

### Synthesis of Compound 140

[chemical structure]

[1620] Compound 136: An ice-cold solution of commercially available compound 135 (50 g, 342 mmol), and methanol (277 mL) was treated dropwise with sulfuric acid (3.36 g, 34.2 mmol) over 10 min then warmed to r.t. gradually overnight. Most of the solvent was removed by rotary evaporation, then saturated aqueous NaHCO₃was carefully added. The pH of the solution was adjusted to 1.9 by addition of 1 M HCI then extracted into EtOAc (200 mL), washed with diluted brine (50 mL), dried (MgSO₄), filtered and reduced to 29 g of colorless oil. Column chromatography gave pure compound 136 as a colorless solid (12.5 g, 23%). ¹H NMR (500 MHz, CDCl₃) δ 12.5-10.5 (vbr, 1H), 3.69 (s, 3H), 2.63 (s, 2H), 1.32 (s, 6H); ¹³C NMR (126 MHz, CDCl₃) δ 183.32, 171.76, 51.72, 43.88, 40.60, 25.34.

[1621] Synthesis of Compound 138: Compound 136 (10 mmol) in DCM (50 mL) is treated dropwise with oxalyl dichloride (10 mmol) then DMF (10 μL) and stirred at r.t. During the reaction a colorless homogeneous solution is formed. After 2 h at r.t. the solvent is removed under reduced pressure. The white residue is redissolved in DCM (20 mL) then added dropwise to a stirring pyridine (10 mL) solution of compound 137 (10 mmol), with monitoring by TLC. After 18 h, the solvents are removed and the residue is subjected to purification by column chromatography with DCM to provide the pure compound 137.

[1622] Compound 139: Compound 138 (5 mmol) as a solution in THF (20 mL) is added to an ice-cold solution of LiBH₄ (5 mmol) in THF (20 mL). Progress of the reaction at r.t. is judged by TLC. After completion of the reaction (complete consumption of starting material), water (100 mL) is added carefully to the ice-cold solution which is subsequently extracted with EtOAc (2×100 mL). The combined organic extracts are dried (MgSO₄), filtered and the solvents are removed by rotary evaporation. The residue is subjected to column chromatography the pure compound 139 is thus obtained.

[1623] Compound 140: Using a procedure analogous to that described for the synthesis of compound 80, and substituting compound 139 for compound 79, pure compound 140 is thus obtained.

### Synthesis of Compound 143

[chemical structure]

[1625] Compound 139: Using a procedure analogous to that described for the synthesis of compound 139 and substituting compound 136 for compound 138, pure compound 141 is thus obtained.

[1626] Compound 142: A solution of compound 141 (8.39 mmol) in DCM/MeOH (12/3 mL) is treated dropwise at 0° C. with a 2 M solution of (diazomethyl)trimethylsilane (1.05 g, 9.23 mmol) in ether over 30 min. After quenching excess reagent with AcOH, washing with water (2×5 mL), drying (MgSO₄), filtration, removal of solvent by rotary evaporation, then column chromatography the pure compound 142 is obtained.

[1627] Compound 143: Using a procedure analogous to that described for the synthesis of compound 80, and substituting compound 142 for compound 79, pure compound 143 is thus obtained.

### Synthesis of Compound 147

[chemical structure]

[1629] Compound 144: Using a procedure analogous to that described for the synthesis of compound 69a, and substituting compound 136 for compound 67, and compound 54 for NH₄Cl plus iPr₂NEt, pure compound 144 is thus obtained.

[1630] Compound 145: LiAlH₄ (100 mL of a 2 M solution in THF) is added in a dropwise fashion to an ice-cold THF (500 mL) solution of compound 144 (86 mmol). The mixture is warmed to r.t. then refluxed for 0.5 h. The residual LiAlH₄ is destroyed by careful addition of saturated Na₂SO₄ to the ice-cold solution until a granular precipitate is formed. The mixture is filtered and reduced then redissolved in EtOAc, dried (MgSO₄), filtered and reduced in vacuo to furnish compound 145 which is sufficiently pure for direct use in the next step of the reaction.

[1631] Compound 146: Using a procedure analogous to that described for the synthesis of compound 124, and substituting compound 145 for compound 123, and Leu-Fmoc-OH for tert-butyl 2-aminoacetate, pure compound 146 is thus obtained.

[1632] Compound 147: Using a procedure analogous to that described for the synthesis of compound 80, and substituting compound 146 for compound 79, and compound 114 for potassium 4-methylbenzenesulfonothioate, pure compound 147 is thus obtained.

### Synthesis of Compound 150

[chemical structure]

[1634] Compound 148: Commercially available chloromethyl pivalate (10 mmol) is added in a dropwise fashion to a stirring solution of compound 130 (20 mmol) in 1,2-dichloroethane (100 mL) under Ar. The resulting solution is heated in order to force to completion (noted by disappearance of chloromethylpivalate material by TLC). Solvent is removed by rotary evaporation, then the residue is subjected to column chromatography to provide the pure compound 148.

[1635] Compound 149: Using a procedure analogous to that described for the synthesis of compound 89, and substituting compound 148 for compound 88, pure compound 149 is thus obtained.

[1636] Compound 150: Using a procedure analogous to that described for the synthesis of compound 87, and substituting compound 149 for compound 86, pure compound 150 is thus obtained.

[1637] Additional Sulfurization Reagents:

[chemical structure]

wherein S^{a} denotes any of the following structures:

[chemical structure]

### Synthesis of Phosphoramidites

[1638] In some embodiments, the present invention provides phosphoramidites, and methods of making the same. In some embodiments, the provided phosphoramidites were used in the synthesis of oligonucleotides described in the present application. Exemplary phosphoramidites and their synthesis are described below.

### Synthesis of Compound 203

[chemical structure]

[1640] Compound 202: N⁴—Bz-5′-O-DMTr-2′-O-MOE-5-methylcytidine (201) (2.00 g, 2.77 mmol) was treated with 2 M ammonia in 2-propanol (Aldrich, anhydrous, 45 mL) and Pyridine (22.5 mL) at 60° C. for 5 h then at r.t. overnight, with monitoring by TLC and UPLC/MS. Solvent was removed (3× azeotrope with toluene) then column chromatography (0-10% MeOH/DCM) gave the pure compound 202 (1.62 g, 95%) as a colorless solid which was homogeneous by TLC and HPLC. (ESI +): calc (M+H)⁺: 618.28, found: 618.53. ¹H NMR (399 MHz, CDCl₃) δ 7.82 (d, J=1.3 Hz, 1H), 7.47-7.40 (m, 2H), 7.37-7.18 (m, 8H), 6.83 (dd, J=8.9, 1.7 Hz, 4H), 5.93 (d, J=1.1 Hz, 1H), 4.43 (td, J=8.3, 4.9 Hz, 1H), 4.24 (ddd, J=11.7, 5.1, 3.0 Hz, 1H), 4.07 (dt, J=8.6, 2.4 Hz, 1H), 4.03-3.98 (m, 1H), 3.90 (ddd, J=11.7, 6.3, 3.3 Hz, 1H), 3.79 (d, J=1.0 Hz, 6H), 3.63-3.52 (m, 3H), 3.44 (dd, J=11.0, 3.0 Hz, 1H), 3.37 (s, 3H), 3.32 (d, J=9.4 Hz, 1H), 1.80-1.64 (s, br, 1H), 1.13 (s, 3H).

[1641] Compound 203: Isobutyric anhydride (0.48 ml, 2.9 mmol) was added dropwise to a solution of compound 202 (1.61 g, 2.61 mmol) in DMF (13 ml) at r.t. The solution was allowed to stir at r.t. over 24 h then the solvent was removed in vacuo at 35° C. Extraction into ether/bicarbonate then drying (MgSO₄), filtration and removal of the solvent gave the crude product as a colorless solid foam. Column chromatography (0-4% MeOH/DCM) gave the pure product (1.75 g, 98%) as a colorless solid foam which was homogenous by TLC and HPLC. (ESI +): calc (M+H)⁺: 688.32, found: 688.56. ¹H NMR (399 MHz, CDCl₃) δ 8.00-7.75 (br, 1H), 7.45-7.39 (m, 2H), 7.34-7.20 (m, 8H), 6.84 (dd, J=9.0, 1.2 Hz, 4H), 5.97 (s, 1H), 4.43 (d, J=6.1 Hz, 1H), 4.20-4.04 (m, 3H), 3.79 (d, J=0.9 Hz, 6H), 3.64-3.58 (m, 1H), 3.64-3.52 (m, 2H), 3.47-3.40 (m, 2H), 3.38 (s, 3H), 1.70-1.55 (br, 1H), 1.39 (d, J=1.0 Hz, 3H), 1.18 (d, J=6.9 Hz, 6H).

### Synthesis of Compound 205

[chemical structure]

[1643] Compound 205: (R)-1-phenyl-1-((S)-pyrrolidin-2-yl)ethanol (4) was dried by azeotropic distillation with toluene (3×3 mL). A solution dried compound 4 (0.725 g, 3.79 mmol) and 4-methylmorpholine (0.833 ml, 7.58 mmol) in toluene (5 mL) was added to an ice-cold solution of trichlorophosphine (0.331 ml, 3.79 mmol) in toluene (5 mL) which was then warmed to r.t. for 1 h then filtered under Ar and reduced to an oil which was used in the next step of the reaction without further purification.

### Synthesis of Compound 207

[chemical structure]

[1645] Compound 207: Using a procedure analogous to that described for the synthesis of compound 205, and substituting compound 206 for compound 204, compound 207 was obtained as a crude brown oil and was used in the next step of the reaction without further purification.

### Synthesis of Compound 208

[chemical structure]

[1647] Compound 208: Compound 203 (1.74 g, 2.53 mmol) was dried by co-evaporation with pyridine (3×5 mL) then toluene (5×5 mL). The resulting dried 203 was dissolved in THF (15 mL), then triethylamine (2.47 ml, 17.7 mmol) was added and the solution was cooled to −78° C. by means of CO₂(s)/acetone cooling bath. A THF solution (15 mL) of the crude compound 205 (3.79 mmol) was added dropwise over 0.5 h then gradually warmed to r.t. After 1 h at r.t., TLC indicated complete conversion of compound 203 to product. The mixture was washed into a separation funnel with chloroform (100 mL) then was extracted with NaHCO₃(saturated, aqueous, 50 mL then 2×25 mL). At each extraction, the aqueous extracts were washed with an additional 1×10 mL of chloroform. The combined chloroform extracts were dried (MgSO₄), filtered, and concentrated by rotary evaporation at 32° C. The crude solid thus obtained was redissolved in DCM containing a few drops of triethylamine then subjected to column chromatography with a hexane/EtOAc gradient containing a steady concentration of 2% triethylamine to give pure compound 208 as a white solid foam. ¹H NMR (399 MHz, CD₃CN) δ 7.92-7.80 (s, 1H), 7.52-7.47 (m, 2H), 7.40-7.24 (m, 12H), 6.88 (dd, J=9.0, 1.1 Hz, 4H), 5.94 (d, J=3.9 Hz, 1H), 4.79 (dt, J=9.6, 5.6 Hz, 1H), 4.31-4.27 (m, 1H), 4.27-4.22 (m, 1H), 3.87 (t, J=4.7 Hz, 2H), 3.75 (d, J=2.0 Hz, 6H), 3.66 (td, J=5.9, 5.5, 2.2 Hz, 1H), 3.58-3.53 (m, 2H), 3.50 (dd, J=11.1, 2.4 Hz, 1H), 3.38 (dd, J=11.0, 3.3 Hz, 1H), 3.31 (s, 3H), 2.85 (dq, J=10.5, 7.4, 6.9 Hz, 2H), 1.73 (s, 3H), 1.52 (d, J=1.0 Hz, 3H), 1.47-1.32 (m, 2H), 1.17 (dd, J=6.9, 0.7 Hz, 6H), 1.05-0.90 (m, 2H); ³¹P NMR (162 MHz, CD₃CN) δ 155.35.

### Synthesis of Compound 210

[chemical structure]

[1649] Compound 210: Using a procedure analogous to that described for compound 208 and substituting compound 209 for compound 203 and compound 207 for compound 205, pure compound 210 was obtained as a colorless solid foam. ¹H NMR (399 MHz, CD₃CN) δ 8.31-8.27 (m, 2H), 7.86 (d, J=1.2 Hz, 1H), 7.62-7.55 (m, 1H), 7.55-7.45 (m, 5H), 7.44-7.24 (m, 12H), 6.94-6.90 (m, 4H), 5.96 (d, J=3.7 Hz, 1H), 4.86-4.76 (m, 1H), 4.29 (dd, J=5.0, 3.8 Hz, 1H), 4.23 (dt, J=5.8, 2.8 Hz, 1H), 3.92-3.80 (m, 2H), 3.78 (s, 6H), 3.74 (ddd, J=7.1, 5.3, 2.1 Hz, 1H), 3.55 (t, J=4.7 Hz, 2H), 3.51 (d, J=2.3 Hz, 1H), 3.41 (dd, J=11.1, 3.4 Hz, 1H), 3.30 (s, 3H), 3.26 (ddd, J=10.3, 6.1, 2.2 Hz, 1H), 2.86 (ddt, J=10.1, 8.2, 7.2 Hz, 1H), 1.72 (d, J=0.7 Hz, 3H), 1.62 (d, J=1.1 Hz, 3H), 1.56-1.41 (m, 2H), 1.09-0.87 (m, 2H); ³¹P NMR (162 MHz, CD₃CN) δ 155.22.

### Synthesis of Compound 212

[chemical structure]

[1651] Compound 212: Using a procedure analogous to that described for compound 208 and substituting compound 211 for compound 203, pure compound 212 was obtained as a colorless solid foam. ¹H NMR (399 MHz, CDCl₃) δ 9.25-8.70 (br, 1H), 7.69 (d, J=1.3 Hz, 1H), 7.46-7.40 (m, 2H), 7.40-7.17 (m, 12H), 6.81 (dd, J=9.0, 2.5 Hz, 4H), 6.09 (d, J=4.3 Hz, 1H), 4.78 (dt, J=9.6, 5.2 Hz, 1H), 4.36-4.26 (m, 2H), 3.94-3.88 (m, 2H), 3.74 (dd, J=4.0, 0.9 Hz, 6H), 3.69 (td, J=6.4, 2.9 Hz, 1H), 3.64-3.56 (m, 3H), 3.44-3.37 (m, 2H), 3.36 (d, J=0.9 Hz, 3H), 3.00 (dtd, J=10.3, 7.9, 6.4 Hz, 1H), 1.72 (s, 3H), 1.54-1.44 (m, 1H), 1.38 (dd, J=6.8, 5.4 Hz, 1H), 1.34 (d, J=1.2 Hz, 3H), 1.23-1.13 (m, 1H), 0.97-0.87 (m, 1H); ³¹P NMR (162 MHz, CDCl₃) δ 158.18.

### Synthesis of Compound 213

[chemical structure]

[1653] Compound 213: Using a procedure analogous to that described for compound 210 and substituting compound 211 for compound 209, pure compound 213 was obtained as a colorless solid foam. ¹H NMR (399 MHz, CDCl₃) δ 9.55-9.10 (br, 1H), 8.09 (d, J=1.5 Hz, 1H), 7.80-7.71 (m, 2H), 7.69-7.47 (m, 12H), 7.20-7.08 (m, 4H), 6.32 (d, J=2.9 Hz, 1H), 5.20-5.11 (m, 1H), 4.66-4.59 (m, 1H), 4.49-4.39 (m, 1H), 4.33-4.24 (m, 1H), 4.16-4.02 (m, 8H), 4.00-3.93 (m, 1H), 3.91-3.84 (m, 2H), 3.73 (dd, J=11.0, 2.5 Hz, 1H), 3.65-3.52 (m, 4H), 3.27-3.16 (m, 1H), 2.15 (s, 3H), 1.88-1.76 (m, 1H), 1.76-1.65 (m, 1H), 1.63-1.49 (m, 4H), 1.29-1.18 (m, 1H); ³¹P NMR (162 MHz, CDCl₃) δ 160.08.

### Synthesis of Compound 215

[chemical structure]

(i) TMSCl, NEt3, 0° C.; (ii) 2,4,6-trimethylbenzene-1-sulfonyl chloride, DMAP; (iii) 1-methylpyrrolidine, 3-hydroxypropanenitrile, DBU, 0° C.; (iv) MeOH/H2O, 4 d, room temperature

[1655] Compound 215: (i) Transient TMS Protection: A solution of N²-isobutyryl-5′-O-DMTr-2′-O-MOE-guanosine (compound 214) (15.04 g, 21.1 mmol) and triethylamine (11.8 ml, 85 mmol) was taken up in ACN (200 mL) then chlorotrimethylsilane (10.4 ml, 82 mmol) was added dropwise to the ice-cold solution which was stirred at r.t. for 1 h with monitoring by TLC. Filtration and removal of solvent, then extraction (DCM/NaHCO₃500 mL/200 mL), drying (MgSO₄), filtration, and removal of the solvent gave the crude compound which was used in the next step of the reaction without further purification. The compound was homogeneous by TLC (RF=0.6, (5% MeOH/DCM)). (ii) Activation of O⁶ position for Cyanoethyl protection: The residue was redissolved in DCM (500 mL) then triethylamine (13.1 ml, 94 mmol) was added, followed by 2,4,6-trimethylbenzene-1-sulfonyl chloride (6.15 g, 28.1 mmol) and DMAP (0.14 g, 1.146 mmol). The mixture was stirred at r.t. for 3 h with monitoring by TLC until full disappearance of the starting material and emergence of a new spot by TLC (Rⱼ=0.9, (5% MeOH/DCM)). (iii) Cyanoethyl protection: 1-methylpyrrolidine (22.43 ml, 211 mmol) was added slowly in a dropwise fashion to the ice-cold solution with further reaction at 0° C. over 1 h, monitoring by TLC (new spot, Rf=0.2, streak, (5% MeOH/DCM)). 3-hydroxypropanenitrile (14.40 ml, 211.0 mmol) then DBU (6.32 mL, 42.1 mmol) were added in a dropwise fashion successively to the still ice-cold solution and stirring was continued for additional 90 min, monitoring by TLC (new spot, Rf=0.6, (5% MeOH/DCM)). In order to force the reaction almost to completion, a further 1.6 mL of DBU was added dropwise with careful monitoring by TLC. The mixture was poured onto NaH₂PO₄ (50 g in 400 mL water), the organics were separated, and washed with dilute NaH₂PO₄ (10 g in 200 mL water), dried (MgSO₄), filtered and reduced by rotary evaporation. (iv) TMS Deprotection: The residue thus obtained in the previous step was redissolved in MeOH (250 mL) then water was added in a dropwise fashion being careful not to induce precipitation. The dropwise addition was continued over 4 days with monitoring by TLC. Most of the solvent was removed and the residue was extracted (DCM/NaHCO₃ (500/200 mL), filtered and reduced. The residue was subjected to column purification (0-5% MeOH/DCM) to give pure compound 215 as a white foam which was homogeneous by TLC and HPLC. (ESI +): calc (M+H)⁺: 767.34, found: 767.03. ¹H NMR (300 MHz, CD₃CN) δ 8.63 (s, 1H), 8.07 (s, 1H), 7.44-7.36 (m, 2H), 7.33-7.18 (m, 7H), 6.84-6.72 (m, 4H), 6.02 (d, J=3.2 Hz, 1H), 4.74 (td, J=6.2, 0.9 Hz, 2H), 4.71-4.64 (m, 2H), 4.14-4.06 (m, 1H), 3.88-3.73 (m, 8H), 3.57-3.41 (m, 4H), 3.32-3.23 (m, 3H), 3.08 (t, J=6.2 Hz, 2H), 2.77 (dt, J=13.7, 6.9 Hz, 1H), 1.14 (dd, J=6.9, 1.2 Hz, 6H).

### Synthesis of Compound 216

[chemical structure]

[1657] Compound 216: Using a procedure analogous to that described for compound 208 and substituting compound 215 for compound 203, pure compound 216 was obtained as a colorless solid foam. ¹H NMR (399 MHz, CD₃CN) δ 8.41 (s, 1H), 8.12 (s, 1H), 7.50-7.44 (m, 2H), 7.40-7.19 (m, 12H), 6.80 (dd, J=8.9, 5.2 Hz, 4H), 6.04 (d, J=5.7 Hz, 1H), 4.99 (t, J=5.5 Hz, 1H), 4.94 (ddd, J=9.9, 5.2, 3.7 Hz, 1H), 4.75 (t, J=6.2 Hz, 2H), 4.29 (q, J=3.8 Hz, 1H), 3.89-3.82 (m, 1H), 3.76-3.68 (m, 7H), 3.64 (ddd, J=6.8, 5.5, 2.3 Hz, 1H), 3.50-3.46 (m, 2H), 3.42 (s, 2H), 3.38-3.28 (m, 1H), 3.21 (s, 3H), 3.09 (t, J=6.2 Hz, 2H), 2.84 (dq, J=10.2, 7.3 Hz, 1H), 2.70-2.58 (m, 1H), 1.76 (s, 3H), 1.46-1.27 (m, 2H), 1.12 (d, J=6.8 Hz, 3H), 1.07 (d, J=6.8 Hz, 3H), 1.04-0.89 (m, 2H); ³¹P NMR (162 MHz, CD₃CN) δ 154.40.

### Synthesis of Compound 217

[chemical structure]

[1659] Compound 217: Using a procedure analogous to that described for compound 210 and substituting compound 215 for compound 209, pure compound 217 was obtained as a colorless solid foam. ¹H NMR (399 MHz, CD₃CN) δ 8.56 (s, 1H), 8.13 (s, 1H), 7.44 (dd, J=8.2, 1.5 Hz, 2H), 7.39-7.19 (m, 12H), 6.81 (dd, J=10.4, 8.9 Hz, 4H), 6.06 (d, J=4.5 Hz, 1H), 4.96-4.86 (m, 2H), 4.75 (t, J=6.2 Hz, 2H), 4.30 (td, J=5.1, 4.7, 2.4 Hz, 1H), 3.83 (dt, J=11.2, 4.3 Hz, 1H), 3.79-3.70 (m, 7H), 3.67 (ddd, J=7.1, 5.2, 2.0 Hz, 1H), 3.52-3.45 (m, 3H), 3.41 (dd, J=10.8, 2.7 Hz, 1H), 3.34-3.24 (m, 1H), 3.21 (s, 3H), 3.08 (t, J=6.1 Hz, 2H), 2.89-2.72 (m, 2H), 1.68 (s, 3H), 1.54-1.38 (m, 2H), 1.14 (dd, J=6.8, 5.4 Hz, 6H), 1.09-1.00 (m, 1H), 0.95-0.83 (m, 1H); ³¹P NMR (162 MHz, CD₃CN) δ 154.93.

### Synthesis of Compound 219

[chemical structure]

[1661] Compound 219: Using a procedure analogous to that described for compound 208 and substituting compound 218 for compound 203, pure compound 219 was obtained as a colorless solid foam. ¹H NMR (399 MHz, CDCl₃) δ 9.31 (s, 1H), 8.72 (s, 1H), 8.26 (s, 1H), 8.07-7.98 (m, 2H), 7.60-7.53 (m, 1H), 7.52-7.43 (m, 4H), 7.38-7.15 (m, 12H), 6.83-6.74 (m, 4H), 6.24 (d, J=5.2 Hz, 1H), 5.03-4.92 (m, 2H), 4.45 (q, J=3.8 Hz, 1H), 3.93 (dt, J=11.4, 4.2 Hz, 1H), 3.77 (ddd, J=7.5, 5.8, 3.2 Hz, 2H), 3.73 (s, 6H), 3.60-3.49 (m, 3H), 3.47-3.37 (m, 2H), 3.26 (s, 3H), 3.02-2.92 (m, 1H), 1.81 (s, 3H), 1.56-1.43 (m, 1H), 1.37 (dq, J=13.2, 6.5 Hz, 1H), 1.22-1.09 (m, 1H), 0.96 (ddt, J=13.1, 7.9, 6.8 Hz, 1H); ³¹P NMR (162 MHz, CDCl₃) δ 157.73.

### Synthesis of Compound 220

[chemical structure]

[1663] Compound 220: Using a procedure analogous to that described for compound 210 and substituting compound 218 for compound 209, pure compound 220 was obtained as a colorless solid foam. ¹H NMR (399 MHz, CDCl₃) δ 9.26 (s, 1H), 8.73 (s, 1H), 8.31 (s, 1H), 8.02 (d, J=7.6 Hz, 2H), 7.60-7.53 (m, 1H), 7.52-7.40 (m, 4H), 7.39-7.13 (m, 12H), 6.84-6.76 (m, 4H), 6.24 (d, J=4.5 Hz, 1H), 4.99 (dt, J=10.0, 5.0 Hz, 1H), 4.84 (t, J=4.7 Hz, 1H), 4.46 (q, J=4.0 Hz, 1H), 3.91 (dt, J=11.1, 4.2 Hz, 1H), 3.85-3.69 (m, 8H), 3.63-3.50 (m, 3H), 3.42 (dd, J=10.7, 4.0 Hz, 1H), 3.40-3.31 (m, 1H), 3.27 (s, 3H), 3.00-2.89 (m, 1H), 1.82 (s, 3H), 1.58-1.38 (m, 2H), 1.20-1.09 (m, 1H), 1.00 (ddt, J=12.3, 8.8, 5.9 Hz, 1H); ³¹P NMR (162 MHz, CDCl₃) δ 158.98.

### Synthesis of Compound 222

[chemical structure]

[1665] Compound 222: Using a procedure analogous to that described for compound 208 and substituting compound 221 for compound 203, pure compound 222 was obtained as a colorless solid foam. ¹H NMR (499 MHz, CDCl₃) δ 10.46 (s, br, 1H), 8.62 (d, J=7.5 Hz, 1H), 7.42 (d, J=7.1 Hz, 2H), 7.36-7.21 (m, 12H), 7.00 (d, J=7.5 Hz, 1H), 6.82 (dd, J=9.0, 7.1 Hz, 4H), 6.03 (s, 1H), 4.77 (td, J=8.7, 4.8 Hz, 1H), 4.34 (dt, J=9.4, 2.3 Hz, 1H), 3.97 (d, J=4.8 Hz, 1H), 3.78 (dd, J=6.7, 3.4 Hz, 1H), 3.74 (s, 3H), 3.71 (s, 6H), 3.68-3.58 (m, 2H), 3.48-3.38 (m, 1H), 3.01 (p, J=7.8 Hz, 1H), 2.27 (s, 3H), 1.72 (s, 3H), 1.49 (tt, J=12.3, 7.0 Hz, 1H), 1.40 (dq, J=13.2, 6.6 Hz, 1H), 1.18 (dq, J=13.9, 7.0 Hz, 1H), 1.02-0.90 (m, 1H); ³¹P NMR (202 MHz, CDCl₃) δ 158.71.

### Synthesis of Compound 223

[chemical structure]

[1667] Compound 223: Using a procedure analogous to that described for compound 210 and substituting compound 221 for compound 209, pure compound 223 was obtained as a colorless solid foam. ¹H NMR (500 MHz, CDCl₃) δ 9.76 (s, 1H), 8.70 (d, J=7.4 Hz, 1H), 7.48-7.41 (m, 2H), 7.41-7.18 (m, 12H), 7.06 (d, J=7.4 Hz, 1H), 6.87 (dd, J=8.9, 1.9 Hz, 4H), 6.00 (s, 1H), 4.80 (td, J=9.2, 4.7 Hz, 1H), 4.33 (d, J=9.5 Hz, 1H), 3.84 (d, J=4.7 Hz, 1H), 3.81 (s, 3H), 3.80 (s, 3H), 3.72 (td, J=6.6, 3.4 Hz, 1H), 3.70-3.62 (m, 4H), 3.53 (dd, J=11.3, 2.2 Hz, 1H), 3.34 (tdd, J=10.7, 7.8, 4.9 Hz, 1H), 2.96 (dq, J=10.3, 7.6 Hz, 1H), 2.25 (s, 3H), 1.83 (s, 3H), 1.56-1.48 (m, 1H), 1.43 (dq, J=13.1, 6.4 Hz, 1H), 1.24-1.16 (m, 1H), 1.00-0.91 (m, 1H). ³¹P NMR (202 MHz, CDCl₃) δ 157.17.

### Synthesis of Compound 225

[chemical structure]

[1669] Compound 225: Using a procedure analogous to that described for compound 208 and substituting compound 224 for compound 203, pure compound 225 was obtained as a colorless solid foam. ¹H NMR (500 MHz, CDCl₃) δ 9.76 (s, br, 1H), 8.70 (d, J=7.4 Hz, 1H), 7.48-7.41 (m, 2H), 7.41-7.18 (m, 12H), 7.06 (d, J=7.4 Hz, 1H), 6.87 (dd, J=8.9, 1.9 Hz, 4H), 6.00 (s, 1H), 4.80 (td, J=9.2, 4.7 Hz, 1H), 4.33 (d, J=9.5 Hz, 1H), 3.84 (d, J=4.7 Hz, 1H), 3.81 (s, 3H), 3.80 (s, 3H), 3.72 (td, J=6.6, 3.4 Hz, 1H), 3.69-3.62 (m, 4H), 3.53 (dd, J=11.3, 2.2 Hz, 1H), 3.34 (tdd, J=10.7, 7.8, 4.9 Hz, 1H), 2.96 (dq, J=10.3, 7.6 Hz, 1H), 2.25 (s, 3H), 1.83 (s, 3H), 1.56-1.48 (m, 1H), 1.43 (dq, J=13.1, 6.4 Hz, 1H), 1.24-1.16 (m, 1H), 1.00-0.91 (m, 1H); ³¹P NMR (202 MHz, CDCl₃) δ 158.97.

### Synthesis of Compound 226

[chemical structure]

[1671] Compound 226: Using a procedure analogous to that described for compound 210 and substituting compound 224 for compound 209, pure compound 226 was obtained as a colorless solid foam. ¹H NMR (499 MHz, CDCl₃) δ 9.8-9.0 (br, 1H), 8.09 (d, J=8.2 Hz, 1H), 7.40 (d, J=7.4 Hz, 2H), 7.36-7.19 (m, 12H), 6.80 (dd, J=11.4, 8.8 Hz, 4H), 6.02 (d, J=2.2 Hz, 1H), 5.22 (d, J=8.1 Hz, 1H), 4.82 (td, J=8.1, 4.9 Hz, 1H), 4.27 (d, J=7.4 Hz, 1H), 3.96 (dd, J=5.0, 2.2 Hz, 1H), 3.81-3.76 (m, 1H), 3.74 (s, 3H), 3.70 (s, 3H), 3.62 (s, 3H), 3.61-3.54 (m, 2H), 3.50-3.41 (m, 1H), 3.04 (dtd, J=10.2, 8.0, 6.3 Hz, 1H), 1.75 (s, 3H), 1.56-1.47 (m, 1H), 1.44-1.35 (m, 1H), 1.26-1.18 (m, 1H), 0.95 (dq, J=12.3, 7.5 Hz, 1H); ³¹P NMR (202 MHz, CDCl₃) δ 158.96.

### Synthesis of Compound 228

[chemical structure]

[1673] Compound 228: Using a procedure analogous to that described for compound 208 and substituting compound 227 for compound 203, pure compound 228 was obtained as a colorless solid foam. ³¹P NMR (202 MHz, CDCl₃) δ 158.16.

### Synthesis of Compound 229

[chemical structure]

[1675] Compound 229: Using a procedure analogous to that described for compound 210 and substituting compound 227 for compound 209, pure compound 229 was obtained as a colorless solid foam. ³¹P NMR (202 MHz, CDCl₃) δ 158.84.

### Synthesis of Compound 231

[chemical structure]

[1677] Compound 231: Using a procedure analogous to that described for compound 208 and substituting compound 230 for compound 203, pure compound 231 was obtained as a colorless solid foam. ¹H NMR (499 MHz, CDCl₃) δ 9.6-9.3 (s, 1H), 8.73 (s, 1H), 8.32 (s, 1H), 7.50-7.41 (m, 2H), 7.39-7.16 (m, 14H), 7.10-7.01 (m, 3H), 6.82 (d, J=8.8 Hz, 4H), 6.21 (d, J=4.1 Hz, 1H), 4.96 (dt, J=10.1, 5.1 Hz, 1H), 4.86 (s, 2H), 4.54 (t, J=4.5 Hz, 1H), 4.43 (q, J=3.9 Hz, 1H), 3.81-3.75 (m, 7H), 3.62 (dd, J=10.8, 3.3 Hz, 1H), 3.54 (s, 3H), 3.46-3.42 (m, 1H), 3.41-3.33 (m, 1H), 3.01-2.93 (m, 1H), 1.82 (s, 3H), 1.56-1.47 (m, 1H), 1.44 (dq, J=13.2, 6.5 Hz, 1H), 1.22-1.11 (m, 1H), 1.03-0.94 (m, 1H); ³¹P NMR (202 MHz, CDCl₃) δ 158.11.

### Synthesis of Compound 232

[chemical structure]

[1679] Compound 232: Using a procedure analogous to that described for compound 210 and substituting compound 230 for compound 209, pure compound 232 was obtained as a colorless solid foam. ¹H NMR (499 MHz, CDCl₃) δ 9.8-9.2 (br, 1H), 8.71 (s, 1H), 8.23 (s, 1H), 7.49-7.43 (m, 2H), 7.40-7.15 (m, 14H), 7.09-7.02 (m, 3H), 6.79 (d, J=8.9 Hz, 4H), 6.20 (d, J=5.6 Hz, 1H), 4.93 (ddd, J=9.3, 5.0, 3.8 Hz, 1H), 4.86 (s, 2H), 4.73 (t, J=5.3 Hz, 1H), 4.43 (q, J=3.9 Hz, 1H), 3.79-3.75 (m, 1H), 3.74 (s, 3H), 3.74 (s, 3H), 3.57 (dt, J=6.8, 3.8 Hz, 1H), 3.52 (s, 3H), 3.46-3.36 (m, 2H), 2.99 (dtd, J=10.1, 7.9, 6.5 Hz, 1H), 1.80 (s, 3H), 1.54-1.45 (m, 1H), 1.39-1.31 (m, 1H), 1.23-1.13 (m, 1H), 0.99-0.90 (m, 1H); ³¹P NMR (202 MHz, CDCl₃) δ 158.13.

### Synthesis of Compound 234

[chemical structure]

[1681] Compound 234: Using a procedure analogous to that described for compound 208 and substituting compound 233 for compound 203, pure compound 234 was obtained as a colorless solid foam.

### Synthesis of Compound 235

[chemical structure]

[1683] Compound 235: Using a procedure analogous to that described for compound 210 and substituting compound 233 for compound 209, pure compound 235 was obtained as a colorless solid foam. ³¹P NMR (202 MHz, CDCl₃) δ 158.75.

### Synthesis of Compound 237

[chemical structure]

[1685] Compound 237: Using a procedure analogous to that described for compound 208 and substituting compound 236 for compound 203, pure compound 237 was obtained as a colorless solid foam. ³¹P NMR (202 MHz, Chloroform-d) δ 159.51 (d, J_{P-F}=9.5 Hz).

### Synthesis of Compound 238

[chemical structure]

[1687] Compound 238: Using a procedure analogous to that described for compound 210 and substituting compound 236 for compound 209, pure compound 238 was obtained as a colorless solid foam. ³¹P NMR (202 MHz, Chloroform-d) δ 159.48.

### Synthesis of Compound 240

[chemical structure]

[1689] Compound 240: Using a procedure analogous to that described for compound 208 and substituting compound 239 for compound 203, pure compound 240 was obtained as a colorless solid foam. ³¹P NMR (202 MHz, CDCl₃) δ 160.20 (d, J_{P-F}=11.0 Hz).

### Synthesis of Compound 241

[chemical structure]

[1691] Compound 241: Using a procedure analogous to that described for compound 210 and substituting compound 239 for compound 209, pure compound 241 was obtained as a colorless solid foam. ³¹P NMR (202 MHz, CDCl₃) δ 159.66 (d, J_{P-F}=8.4 Hz).

### Synthesis of Compound 243

[chemical structure]

[1693] Compound 243: Using a procedure analogous to that described for compound 208 and substituting compound 242 for compound 203, pure compound 243 was obtained as a colorless solid foam. ³¹P NMR (202 MHz, CDCl₃) δ 160.20 (d, J=11.0 Hz).

### Synthesis of Compound 244

[chemical structure]

[1695] Compound 244: Using a procedure analogous to that described for compound 210 and substituting compound 242 for compound 209, pure compound 244 was obtained as a colorless solid foam. ³¹P NMR (202 MHz, CDCl₃) δ 156.52 (d, J_{P-F}=8.5 Hz).

### Synthesis of Compound 246

[chemical structure]

[1697] Compound 246: Using a procedure analogous to that described for compound 208 and substituting compound 245 for compound 203, pure compound 246 is obtained as a colorless solid foam.

### Synthesis of Compound 247

[chemical structure]

[1699] Compound 247: Using a procedure analogous to that described for compound 210 and substituting compound 245 for compound 209, pure compound 247 is obtained as a colorless solid foam.

### Synthesis of Compound 249

[chemical structure]

[1701] Compound 249: Using a procedure analogous to that described for compound 208 and substituting compound 248 for compound 203, pure compound 249 is obtained as a colorless solid foam.

### Synthesis of Compound 250

[chemical structure]

[1703] Compound 250: Using a procedure analogous to that described for compound 210 and substituting compound 248 for compound 209, pure compound 250 is obtained as a colorless solid foam.

### Synthesis of Compound 252

[chemical structure]

[1705] Compound 252: Using a procedure analogous to that described for compound 208 and substituting compound 251 for compound 203, pure compound 252 is obtained as a colorless solid foam.

### Synthesis of Compound 253

[chemical structure]

[1707] Compound 253: Using a procedure analogous to that described for compound 210 and substituting compound 251 for compound 209, pure compound 253 is obtained as a colorless solid foam.

### Synthesis of Compound 255

[chemical structure]

[1709] Compound 255: Using a procedure analogous to that described for compound 208 and substituting compound 254 for compound 203, pure compound 255 is obtained as a colorless solid foam.

### Synthesis of Compound 256

[chemical structure]

[1711] Compound 256: Using a procedure analogous to that described for compound 210 and substituting compound 254 for compound 209, pure compound 256 is obtained as a colorless solid foam.

### Synthesis of Compound 258

[chemical structure]

[1713] Compound 258: Using a procedure analogous to that described for compound 208 and substituting compound 257 for compound 203, pure compound 258 is obtained as a colorless solid foam.

### Synthesis of Compound 259

[chemical structure]

[1715] Compound 259: Using a procedure analogous to that described for compound 210 and substituting compound 257 for compound 209, pure compound 259 is obtained as a colorless solid foam.

### Examples 2-16

[1716] Summarized below in Table E-1 is the synthetic procedure for Examples 2-16 on the DNA/RNA Synthesizer ABI-394.

TABLE E-1
Summary for Oligonucleotide Synthesis on a DNA/RNA Synthesizer ABI-394
Used for the Synthesis of Examples 2-16.

| | | | delivery time (sec) | | wait time (sec) | |
|---|---|---|---|---|---|---|
| step | reaction | reagent | 1 μmol | 10 μmol | 1 μmol | 10 μmol |
| 1 | detritylation | 3% TCA in DCM | 3 + 60 + | 3 + 90 + | N.A. | N.A. |
| | | | 10 | 10 | | |
| 2 | coupling | 0.15 M phosphoramidite in | 5 + 4 | 10 + 6 | 30 + 600 | 30 + 600 |
| | | ACN + 1.2 M CMPT in ACN | | | | |
| 3 | capping 1 | 5% Pac₂O in THF/2,6-lutidine | 20 | 30 | 60 | 60 |
| 4 | capping 2 | 5% Pac₂O in THF/2,6-lutidine + | 20 | 30 | 60 | 60 |
| | | 16% NMI in THF | | | | |
| 5 | sulfurization | 0.3 M S-cyanoethyl- | 10 + 4 × 2 | 15 + 4 × 4 | 300 + 3 × | 300 + 3 × |
| | | MethylThioSulfonate | | | 150 + 600 | 150 + 600 |
| | | [chemical structure] in ACN/BSTFA | | | | |

[1717] Examples 2-9: The oligonucleotides containing stereodefined phosphorothioate diester internucleotidic linkages were synthesized on an ABI-394 DNA/RNA synthesizer according to the cycle summarized in Table E-1 using a 10 μmol synthesis column and 6.5 μmol of succinyl linked dC on CPG. The synthesis cycle was performed with removal of the terminal 5′-O-DMTr group (DMT Off). The solid support was washed with dry ACN and dried under a flux of argon. The dry solid support was then treated with 5 mL of anhydrous 1 M solution of 1,8-diazabicycloundec-7-ene (DBU) in dry ACN-trimethylsilyl chloride—16:1 (v/v) for 10 min at r.t., during which time the solution was slowly pushed through the column by means of a plastic luer syringe fixed to the outlet of the column. The support was then washed with dry ACN and dried under vacuum. The dry CPG was placed in a plastic vial and then treated with 3 mL of 28% aqueous ammonia for a period of 18 h at r.t. The solvents were evaporated to dryness, the residue was re-suspended in 10% aqueous DMSO, and the solid support was filtered off. The crude product was purified by anion exchange preparative HPLC (Gradient of 0.25 to 1.75 M NaCl in 20 mM NaOH). The fractions having purity above 95% were pooled, concentrated and desalted by reverse-phase HPLC (Gradient of 0 to 80% ACN). The final desalted product was lyophilized from water.

[1718] Examples 10-16: The oligonucleotides containing stereodefined phosphorothioate diester internucleotidic linkages were synthesized on an ABI-394 DNA/RNA synthesizer according to the cycle summarized in Table E-1 using 1 μmol synthesis column and 3 μmol of succinyl linked dC on CPG. The synthesis cycle was performed with removal of the terminal 5′-O-DMTr group (DMT Off). The solid support was washed with dry ACN and dried under a flux of argon. The dry solid support was then treated with 5 mL of anhydrous 1 M solution of 1,5-diazabicyclo(4.3.0) non-5-ene (DBN) in dry ACN-trimethylsilyl chloride—16:1 (v/v) for 10 min at r.t. The DBN solution was slowly pushed through the column by means of a plastic luer syringe fixed to the outlet of the column. The support was then washed with dry ACN and dried under vacuum. The dry CPG was placed in a plastic vial and was treated with 2 mL of 28% aqueous ammonia for a period of 18 h at r.t. The solvents were evaporated to dryness, the residue was re-suspended in 10% aqueous DMSO, and the solid support was filtered off.

[1719] Purification and desalting of examples 2-16: The crude product was purified by Waters 2525 BGM HPLC system, equipped with a 2487 dual wavelength detector and with FCO and Flex inject. An AP-1 glass column from Waters, 10×200 mm was filled with Source 15Q Support (GE Healthcare, Part no. 17-0947-01) and was used with flow rate of 4 mL/min. Column was heated during all the purifications using a TL600 mobile phase heater and TL150 Temperature controller (Timberline Instruments) set at 75° C. Buffer A: 20 mM NaOH and Buffer B: 20 mM NaOH, 2.5 M NaCl were used with step gradients starting from 30% B to 70% B. The fractions having purity above 95% were pooled, concentrated and desalted on the same HPLC system by reverse-phase column (XBridge Semi Prep, 250×10 mm, C₁₈, 5 μm) with a gradient of water to 80% ACN and 4 mL/min flow rate. The final desalted product was concentrated in speedvac followed by lyophilization from water.

[1720] HPLC analysis of purified oligonucleotides: Quality of oligonucleotides was determined using DNA Pac 100 (10×250 mm) and using the following conditions:

Buffer A: 10 mM Tris HCI, 50% HCI, pH=8.0
Buffer B: A +0.8 M NaClO₄, pH=8.0
Column temperature: 60° C.
Gradient method:

| | Time | Flow | % A | % B | Curve |
|---|---|---|---|---|---|
| 1 | 0.01 | 1.00 | 85.0 | 15.0 | |
| 2 | 3.00 | 1.00 | 85.0 | 15.0 | 1 |
| 3 | 23.00 | 1.00 | 40.0 | 60.0 | 6 |
| 4 | 25.00 | 1.00 | 5.0 | 95.0 | 6 |
| 5 | 25.50 | 1.00 | 85.0 | 15.0 | 6 |
| 6 | 30.00 | 1.00 | 85.0 | 15.0 | 1 |

LCMS analysis method:

### Eluent A: 15 mM TEA, 400 mM HFIP, Water

### Eluent B: 50:50 Buffer A/Methanol

### Column: UPLC@OST C₁₈ 1.7 μm, 2.1×500 mm

[1721] Column temperature=50° C.
Gradient method:

| Time | Flow | % A | % B | Curve |
|---|---|---|---|---|
| 0 | 0.2 | 95 | 5 | |
| 10 | 0.2 | 35 | 65 | 6 |
| 12 | 0.2 | 5 | 95 | 6 |
| 12.5 | 0.2 | 95 | 5 | 6 |
| 15 | 0.2 | 95 | 5 | 1 |

### Example 2. Synthesis of Oligonucleotide 101 (All-(Rp)-d[GsCsCsTsCsAsGsTsCsTsGsCsTsTsCsGsCsAsCsC]) (SEQ ID NO: 106)

[1722] Oligonucleotide 101 was synthesized as described above. RT in IEX-HPLC: 14.70 min. UPLC/ESI-MS: Calcd for C₁₉₁H₂₄₆N₆₇O₁₀₂P₁₉S₁₉: 6310.2; Found: 6310.4.

### Example 3. Synthesis of Oligonucleotide 102 (All-(Sp)-d[GsCsCsTsCsAsGsTsCsTsGsCsTsTsCsGsCsAsCsC]) (SEQ ID NO: 106)

[1723] Oligonucleotide 102 was synthesized as described above. RT in IEX-HPLC: 15.49 min. UPLC/ESI-MS: Calcd for C₁₉₁H₂₄N₆₇O₁₀₂P₁₉S₁₉: 6310.2; Found: 6310.2.

### Example 4. Synthesis of Oligonucleotide 103 ((Rp, Rp, Rp, Rp, Rp, Sp, Sp, Sp, Sp, Sp, Sp, Sp, Sp, Sp, Rp, Rp, Rp, Rp, Rp)-d[GsCsCsTsCsAsGsTsCsTsGsCsTsTsCsGsCsAsCsC] (SEQ ID NO: 106) (5R-9S-5R))

[1724] Oligonucleotide 103 was synthesized as described above. RT in IEX-HPLC: 15.10 min. UPLC/ESI-MS: Calcd for C₁₉₁H₂₄₆N₆₇O₁₀₂P₁₉S₁₉: 6310.2; Found: 6310.3.

### Example 5. Synthesis of Oligonucleotide 104 ((Sp, Sp, Sp, Sp, Sp, Rp, Rp, Rp, Rp, Rp, Rp, Rp, Rp, Rp, Sp, Sp, Sp, Sp, Sp)-d[GsCsCsTsCsAsGsTsCsTsGsCsTsTsCsGsCsAsCsC] (SEQ ID NO: 106) (5S-9R-5S))

[1725] Oligonucleotide 104 was synthesized as described above. RT in IEX-HPLC: 15.04 min. UPLC/ESI-MS: Calcd for C₁₉₁H₂₄N₆₇O₁₀₂P₁₉S₁₉: 6310.2; Found: 6307.2.

### Example 6. Synthesis of Oligonucleotide 105 ((Sp, Rp, Rp, Rp, Rp, Rp, Rp, Rp, Rp, Rp, Rp, Rp, Rp, Rp, Rp, Rp, Rp, Rp, Sp)-d[GsCsCsTsCsAsGsTsCsTsGsCsTsTsCsGsCsAsCsC] (SEQ ID NO: 106) (1S-17R-1S))

[1726] Oligonucleotide 105 was synthesized as described above. RT in IEX-HPLC: 14.75 min. UPLC/ESI-MS: Calcd for C₁₉₁H₂₄N₆₇O₁₀₂P₁₉S₁₉: 6310.2; Found: 6310.2.

### Example 7. Synthesis of Oligonucleotide 106 ((Rp, Sp, Sp, Sp, Sp, Sp, Sp, Sp, Sp, Sp, Sp, Sp, Sp, Sp, Sp, Sp, Sp, Sp, Rp)-d[GsCsCsTsCsAsGsTsCsTsGsCsTsTsCsGsCsAsCsC] (SEQ ID NO: 106) (1R-17S-1R))

[1727] Oligonucleotide 106 was synthesized as described above. RT in IEX-HPLC: 15.43 min. UPLC/ESI-MS: Calcd for C₁₉₁H₂₄₆N₆₇O₁₀₂P₁₉S₁₉: 6310.2; Found: 6309.6.

### Example 8. Synthesis of Oligonucleotide 107 ((Rp, Sp, Rp, Sp, Rp, Sp, Rp, Sp, Rp, Sp, Rp, Sp, Rp, Sp, Rp, Sp, Rp, Sp, Rp)-d[GsCsCsTsCsAsGsTsCsTsGsCsTsTsCsGsCsAsCsC] (SEQ ID NO: 106) ((R/S)₉R))

[1728] Oligonucleotide 107 was synthesized as described above. RT in IEX-HPLC: 15.02 min. UPLC/ESI-MS: Calcd for C₁₉₁H₂₄N₆₇O₁₀₂P₁₉S₁₉: 6310.2; Found: 6310.7.

### Example 9. Synthesis of Oligonucleotide 108 ((Sp, Rp, Sp, Rp, Sp, Rp, Sp, Rp, Sp, Rp, Sp, Rp, Sp, Rp, Sp, Rp, Sp, Rp, Sp)-d[GsCsCsTsCsAsGsTsCsTsGsCsTsTsCsGsCsAsCsC] (SEQ ID NO: 106) ((S/R),S))

[1729] Oligonucleotide 108 was synthesized as described above. RT in IEX-HPLC: 15.10 min. UPLC/ESI-MS: Calcd for C₁₉₁H₂₄₆N₆₇O₁₀₂P₁₉S₁₉: 6310.2; Found: 6307.9.

### Example 10. Synthesis of Oligonucleotide 109 ((Sp, Sp, Sp, Rp, Rp, Rp, Rp, Rp, Rp, Rp, Rp, Rp, Rp, Rp, Rp, Rp, Sp, Sp, Sp)d[GsCsCsTsCsAsGsTsCsTsGsCsTsTsCsGsCsAsCsC] (SEQ ID NO: 106) (3S-13R-3S))

[1730] Oligonucleotide 109 was synthesized as described above. RT in IEX-HPLC: 14.91 min. UPLC/ESI-MS: Calcd for C₁₉₁H₂₄₆N₆₇O₁₀₂P₁₉S₁₉: 6310.2; Found: 6309.5.

### Example 11. Synthesis of Oligonucleotide 110 ((Rp, Rp, Rp, Sp, Sp, Sp, Sp, Sp, Sp, Sp, Sp, Sp, Sp, Sp, Sp, Sp, Rp, Rp, Rp)-d[GsCsCsTsCsAsGsTsCsTsGsCsTsTsCsGsCsAsCsC] (SEQ ID NO: 106) (3R-13S-3R))

[1731] Oligonucleotide 110 was synthesized as described above. RT in IEX-HPLC: 15.24 min. UPLC/ESI-MS: Calcd for C₁₉₁H₂₄N₆₇O₁₀₂P₁₉S₁₉: 6310.2; Found: 6309.3.

### Example 12. Synthesis of Oligonucleotide 111 ((Sp, Sp, Sp, Sp, Sp, Sp, Sp, Sp, Sp, Sp, Sp, Sp, Sp, Sp, Sp, Sp, Sp, Sp, Rp)-d[GsCsCsTsCsAsGsTsCsTsGsCsTsTsCsGsCsAsCsC] (SEQ ID NO: 106) ((18S/R¹⁹))

[1732] Oligonucleotide 111 was synthesized as described above. RT in IEX-HPLC: 15.69 min. UPLC/ESI-MS: Calcd for C₁₉₁H₂₄₆N₆₇O₁₀₂P₁₉S₁₉: 6310.2; Found: 6309.4.

### Example 13. Synthesis of Oligonucleotide 113 ((Sp, Rp, Sp, Sp, Sp, Sp, Sp, Sp, Sp, Sp, Sp, Sp, Sp, Sp, Sp, Sp, Sp, Sp, Sp)-d[GsCsCsTsCsAsGsTsCsTsGsCsTsTsCsGsCsAsCsC] (SEQ ID NO: 106) (18S/R²))

[1733] Oligonucleotide 113 was synthesized as described above. RT in IEX-HPLC: 15.72 min. UPLC/ESI-MS: Calcd for C₁₉₁H₂₄₆N₆₇O₁₀₂P₁₉S₁₉: 6310.2; Found: 6311.0.

### Example 14. Synthesis of Oligonucleotide 114 ((Rp, Rp, Sp, Rp, Rp, Sp, Rp, Rp, Sp, Rp, Rp, Sp, Rp, Rp, Sp, Rp, Rp, Sp, Rp)-d[GsCsCsTsCsAsGsTsCsTsGsCsTsTsCsGsCsAsCsC] (SEQ ID NO: 106) ((RRS)₆-R))

[1734] Oligonucleotide 114 was synthesized as described above. RT in IEX-HPLC: 14.14 min. UPLC/ESI-MS: Calcd for C₁₉₁H₂₄₆N₆₇O₁₀₂P₁₉S₁₉: 6310.2; Found: 6313.7.

### Example 15. Synthesis of Oligonucleotide 115 ((Sp, Rp, Rp, Sp, Rp, Rp, Sp, Rp, Rp, Sp, Rp, Rp, Sp, Rp, Rp, Sp, Rp, Rp, Sp)-d[GsCsCsTsCsAsGsTsCsTsGsCsTsTsCsGsCsAsCsC] (SEQ ID NO: 106) (S—(RRS)₆))

[1735] Oligonucleotide 115 was synthesized as described above. RT in IEX-HPLC: 14.30 min. UPLC/ESI-MS: Calcd for C₁₉₁H₂₄₆N₆₇O₁₀₂P₁₉S₁₉: 6310.2; Found: 6313.7.

### Example 16. Synthesis of Oligonucleotide 116 (Rp, Sp, Rp, Rp, Sp, Rp, Rp, Sp, Rp, Rp, Sp, Rp, Rp, Sp, Rp, Rp, Sp, Rp, Rp)d[GsCsCsTsCsAsGsTsCsTsGsCsTsTsCsGsCsAsCsC] (SEQ ID NO: 106) (RS-(RRS)₅-RR))

[1736] Oligonucleotide 116 was synthesized as described above. RT in IEX-HPLC: 14.17 nun. UPLC/ESI-MS: Calcd for C₁₉₁H₂₄₆N₆₇O₁₀₂P₁₉S₁₉: 6310.2; Found: 6312.4.

[1737] Results of Examples 2-16 are summarized in Table E-2, below:

TABLE E-2
Summary of Examples 2-16.

| Oli- | | | Descrip- | |
|---|---|---|---|---|
| gonu- | SEQ | | tion of | RT- |
| cleo- | ID | | stereo- | IEX |
| tide | NO: | 5′-sequence-3′ | chemistry | (min) |
| 101 | 106 | d[GsCsCsTsCsAsGsTsCsT | All-(Rp) | 14.70 |
| | | sGsCsTsTsCsGsCsAsCsC] | | |
| 102 | 106 | d[GsCsCsTsCsAsGsTsCsT | All-(Sp) | 15.49 |
| | | sGsCsTsTsCsGsCsAsCsC] | | |
| 103 | 106 | d[GsCsCsTsCsAsGsTsCsT | 5R-9S-5R | 15.10 |
| | | sGsCsTsTsCsGsCsAsCsC] | | |
| 104 | 106 | d[GsCsCsTsCsAsGsTsCsT | 5S-9R-5S | 15.04 |
| | | sGsCsTsTsCsGsCsAsCsC] | | |
| 105 | 106 | d[GsCsCsTsCsAsGsTsCsT | 1S-17R-1S | 14.75 |
| | | sGsCsTsTsCsGsCsAsCsC] | | |
| 106 | 106 | d[GsCsCsTsCsAsGsTsCsT | 1R-17S-1R | 15.43 |
| | | sGsCsTsTsCsGsCsAsCsC] | | |
| 107 | 106 | d[GsCsCsTsCsAsGsTsCsT | (R/S)₉R | 15.02 |
| | | sGsCsTsTsCsGsCsAsCsC] | | |
| 108 | 106 | d[GsCsCsTsCsAsGsTsCsT | (S/R)₉S | 15.10 |
| | | sGsCsTsTsCsGsCsAsCsC] | | |
| 109 | 106 | d[GsCsCsTsCsAsGsTsCsT | 3S-13R-3S | 14.91 |
| | | sGsCsTsTsCsGsCsAsCsC] | | |
| 110 | 106 | d[GsCsCsTsCsAsGsTsCsT | 3R-13S-3R | 15.24 |
| | | sGsCsTsTsCsGsCsAsCsC] | | |
| 111 | 106 | d[GsCsCsTsCsAsGsTsCsT | 18S/R¹⁹ | 15.69 |
| | | sGsCsTsTsCsGsCsAsCsC] | | |
| 113 | 106 | d[GsCsCsTsCsAsGsTsCsT | 18S/R² | 15.72 |
| | | sGsCsTsTsCsGsCsAsCsC] | | |
| 114 | 106 | d[GsCsCsTsCsAsGsTsCsT | (RRS)₆-R | 14.14 |
| | | sGsCsTsTsCsGsCsAsCsC] | | |
| 115 | 106 | d[GsCsCsTsCsAsGsTsCsT | S-(RRS)₆ | 14.30 |
| | | sGsCsTsTsCsGsCsAsCsC] | | |
| 116 | 106 | d[GsCsCsTsCsAsGsTsCsT | RS-(RRS)₅- | 14.17 |
| | | sGsCsTsTsCsGsCsAsCsC] | RR | |

### Example 17. Synthesis of Control Oligonucleotides

[1738] The control oligonucleotides (see Table E-3) were synthesized using the standard chemistry methods for automated solid-phase oligonucleotide synthesis (Beaucage, S. L. and Iyer, R. P., Tetrahedron, 1992, 48, 2223-2311). More specifically, stereorandom DNA was synthesized using standard DNA phosphoramidites (ChemGenes Co.), ethylthiotetrazole (ETT, Muang et al., Tetrahedron Lett., 2004, 45, 6497-6499) as the activator (Glen Research) and N,N-dimethyl-N′-(3-thioxo-3H-1,2,4-dithiazol-5-yl)methanimidamide (DDTT, AM Chemicals) as the sulfurizing reagent (Guzaev, A.; Tetrahedron Lett., 2011, 52, 434-437). The phosphoramidite coupling time was 2 min and the sulfurization time was 10 min. The oligonucleotide was deprotected and purified using standard methods. DNA phosphodiester was synthesized using standard DNA phosphoramidites, ETT as the activator and iodine/pyridine/water as the oxidizing reagent. 2′-O-Methoxyethyl (MOE) DNA was synthesized using in-house prepared 2′-O-Methoxyethyl (MOE) phosphoramidites (Martin, P.; Helv. Chim. Acta. 1995, 78, 486-504; Ross, B.; Song, Q.; 2004, US patent publication No. 20040082775), ETT as the activator and DDTT as the sulfurizing reagent. The times for coupling were 10 min and the times for sulfurization were 10 min. RNA was synthesized using standard RNA phosphoramidites (ChemGenes Co.), ETT as the activator and iodine/pyridine/water as the oxidizing reagent. The coupling times were 10 min.

[1739] All oligonucleotides were deprotected and purified using standard methods.

### Purification of RNA (Oligonucleotide 117):

[1740] Waters 2525 BGM, 2487 Dual wavelength detector equipped with FCO and Flex injector
Buffer A: 20 mM Sodium Phosphate pH=8.5
Buffer B: 20 mM Sodium Phosphate, 1 M NaBr pH=8.5
Column: AP-1 glass column from Waters, 10×200 mm, filled with Super Q-5PW (20), TSK Gel (Anion Exchange) from TOSOH
Column Temperature: 70° C. (Timberline Instruments, TL600 mobile phase heater and TL150 Temperature controller)

### Gradient Used:

| Time | Flow (mL/min) | % A | % B | Curve |
|---|---|---|---|---|
| Initial | | 100 | 0 | |
| 10 | 4 | 100 | 0 | 1 |
| 25 | 4 | 80 | 20 | 6 |
| 115 | 4 | 55 | 45 | 6 |
| 125 | 4 | 0 | 100 | 6 |
| 130 | 4 | 100 | 0 | 6 |
| 140 | 4 | 100 | 0 | 1 |

[1742] As shown in FIG. 1, the chirally controlled phosphorothioate diester 20-mer oligonucleotide (All-(Rp), Oligonucleotide 101, FIG. 1, A) has a different retention time than that of the phosphorothioate diester 20-mer standard stereorandom oligonucleotide (Oligonucleotide 118, FIG. 1, C) and has a sharper peak. One of skill in the art understands that during purification of the stereorandom oligonucleotide 108, it is likely that most of the all-(Rp) oligonucleotide (101, present in an approximately ½¹⁹ fraction of the mixture stereorandom oligonucleotide 108) would be lost.

[1743] Results of Example 17 are summarized in Table E-3, below.

TABLE E-3
Summary of Example 17.

| Oligonu- | SEQ ID | | | RT |
|---|---|---|---|---|
| cleotide | NO: | 5′-sequence-3′ | Description | (min) |
| 117 | 114 | GGUGCGAAGCAGAC | RNA | 5.10 |
| | | UGAGGC | | |
| 118 | 106 | d[GsCsCsTsCsAs | stereo- | 15.04 |
| | | GsTsCsTsGsCsTs | random | |
| | | TsCsGsCsAsCsC] | | |
| 119 | 106 | d[GCCTCAGTC | DNA | 6.90 |
| | | TGC TTC GCACC] | | |
| 120 | 106 | (Gs5mCs5mCsTs5 | stereo- | 15.49 |
| | | mCs)_{MOE} | random | |
| | | d[AsGsTs5mCsTs | | |
| | | Gs5mCsTsTs5mCs] | | |
| | | (Gs5mCsAs5mCs5 | | |
| | | mC)_{MOE} | | |
| 121 | 115 | d[GsAsTsGsCsCs | scrambled | 15.09 |
| | | TsCsTsCsCsTsAs | | |
| | | CsGsCsGsCsCsT] | | |

[1744] Procedures for Examples 18-21: The oligonucleotides containing stereodefined morpholinoethyl phosphorothioate triester internucleotidic linkages were synthesized on an ABI-394 DNA/RNA synthesizer according to the cycle summarized in Table E-4 using 1 μmol synthesis column and 0.8 μmol of oxalyl linked dC on HCP. The synthesis cycle was performed with removal of the terminal 5′-O-DMTr group (DMT Off). The solid support was washed with dry ACN and dried under a flux of argon. The dry HCP was placed in a plastic vial and was treated with 1 mL of dry propylamine in dry pyridine (in a 1:4 ratio) for a period of 18 h at r.t. The solvents were then evaporated and the residue was re-suspended with ˜pH 1.5 aqueous solution containing 10% DMSO and the HCP support was filtered off. The crude product was purified by reverse phase preparative HPLC. The fractions having purity above 95% were pooled, concentrated and desalted by reverse-phase HPLC (Gradient of 0 to 80% ACN). The final desalted product was lyophilized from water.

TABLE E-4
Summary for Oligonucleotide Synthesis on a DNA/RNA Synthesizer ABI-394
Used for the Synthesis of Examples 18-21.

| | | | delivery time | wait time |
|---|---|---|---|---|
| step | reaction | reagent | (sec) | (sec) |
| 1 | detritylation | 3% TCA in DCM | 3 + 60 + 10 | N.A. |
| 2 | coupling | 0.15M phosphoramidite in ACN + 1.2M CMPT | 5 + 4 | 30 + 600 |
| | | in ACN | | |
| 3 | capping 1 | 5% Pac₂O in THF/2,6-lutidine | 20 | 60 |
| 4 | capping 2 | 5% Pac₂O in THF/2,6-lutidine + 16% NMI in THF | 20 | 60 |
| 5 | sulfurization | 0.3M S-Morpholinoethyl-ToluylThioSulfonate | 10 + 4 × 2 | 300 + 3 × |
| | | | | 150 + 600 |
| | | [chemical structure] | | |

### General Purification Method for Examples 18-21:

[1745] Buffer A: 20 mM Phosphate pH=6.0 (adjusted with phosphoric acid)

### Buffer B: ACN

[1746] Column: XBridge Prep C₁₈, 5 μm, C₁₈, 250×10 mm, Part #186003256
Buffer heater set temperature=50° C.
Signal monitored at 254 and 280 nm

### Gradient Used:

| Time | Flow (ml/min) | % A | % B | Curve |
|---|---|---|---|---|
| Initial | | 99 | 1 | |
| 5 | 4 | 99 | 1 | 1 |
| 10 | 4 | 77 | 23 | 6 |
| 60 | 4 | 70 | 30 | 6 |
| 65 | 4 | 20 | 80 | 6 |
| 70 | 4 | 20 | 80 | 6 |
| 71 | 4 | 99 | 1 | 6 |
| 80 | 4 | 99 | 1 | 1 |

### Analytical HPLC Methods for Oligonucleotides.

### HPLC Method 1:

[1748] Buffer A: 20 mM Phosphate pH=6.0 (adjusted with phosphoric acid)

### Buffer B: ACN

[1749] Column: XBridge C₁₈, 3.5 μm, C₁₈, 4.6×50 mm, Part #186003034
Buffer heater set temperature=35° C.
Signal monitored at 254 and 280 nm

### Gradient Used:

| Time | Flow (ml/min) | % A | % B | Curve |
|---|---|---|---|---|
| Initial | | 95 | 5 | |
| 3 | 1 | 95 | 5 | 1 |
| 23 | 1 | 60 | 40 | 6 |
| 25 | 1 | 40 | 60 | 6 |
| 25.5 | 1 | 95 | 5 | 6 |
| 30 | 1 | 95 | 5 | 1 |

### HPLC Method 2:

### Buffer A: 50 mM TEAA, pH 7.8

### Buffer B: ACN

### Column: XBridge C₁₈, 3.5 μm, Cis, 4.6×50 mm, Part #186003034

[1751] Buffer heater set temperature=60° C.
Signal monitored at 254 and 280 nm

### Gradient Used:

| Time | Flow (ml/min) | % A | % B | Curve |
|---|---|---|---|---|
| Initial | | 99 | 1 | |
| 2 | 1 | 99 | 1 | 1 |
| 22 | 1 | 65 | 35 | 6 |
| 25 | 1 | 5 | 95 | 6 |
| 25.5 | 1 | 5 | 95 | 6 |
| 30 | 1 | 99 | 1 | 1 |

### HPLC Method 3:

| Time | Flow (ml/min) | % A | % B | Curve |
|---|---|---|---|---|
| Initial | | 85 | 15 | |
| 2 | 1 | 85 | 15 | 1 |
| 20 | 1 | 60 | 40 | 6 |
| 22 | 1 | 5 | 95 | 6 |
| 25 | 1 | 5 | 95 | 6 |
| 25.5 | 1 | 85 | 15 | 6 |
| 30 | 1 | 85 | 15 | 1 |

### HPLC Method 4:

| Time | Flow (ml/min) | % A | % B | Curve |
|---|---|---|---|---|
| Initial | | 85 | 15 | |
| 2 | 1 | 85 | 15 | 1 |
| 20 | 1 | 40 | 60 | 6 |
| 22 | 1 | 5 | 95 | 6 |
| 25 | 1 | 5 | 95 | 6 |
| 25.5 | 1 | 85 | 15 | 6 |
| 30 | 1 | 85 | 15 | 1 |

### Example 18. Synthesis of Oligonucleotide 122 (All-(Rp)-d[Gs1Cs1Cs1Ts1Cs1As1Gs1Ts1Cs1Ts1Gs1Cs1Ts1Ts1Cs1Gs1Cs1As1Cs1C] (SEQ ID NO: 106)

[chemical structure]

[1756] Oligonucleotide 122 was synthesized as described above. RT in RP-HPLC: (HPLC method 1): 15.2 min. UPLC/ESI-MS: Calcd for C₃₀₅H₄₅₅N₈₆O₁₂₁P₁₉S₁₉: 8460.25; Found: 8462.0.

### Example 19. Synthesis of Oligonucleotide 123 ((Sp, Rp, Rp, Rp, Rp, Rp, Rp, Rp, Rp, Rp, Rp, Rp, Rp, Rp, Rp, Rp, Rp, Rp, Sp)-d[Gs1Cs1Cs1Ts1Cs1As1Gs1Ts1Cs1Ts1Gs1Cs1Ts1Ts1Cs1Gs1Cs1As1Cs1C] (SEQ ID NO: 106) ((1S-17R-1S)

[1757] Oligonucleotide 123 was synthesized as described above. RT in RP-HPLC (HPLC method 1): 16.2 min. UPLC/ESI-MS: Calcd for C₃₀₅H₄₅₅N₈₆O₁₂₁P₁₉S₁₉: 8460.3; Found: 8461.5.

### Example 20. Synthesis of Oligonucleotide 124 (All-(Sp)-d[Gs1Cs1Cs1Ts1Cs1As1Gs1Ts1Cs1Ts1Gs1Cs1Ts1Ts1Cs1Gs1Cs1As1Cs1C] (SEQ ID NO: 106)

[1758] Oligonucleotide 124 was synthesized as described above. RT in RP-HPLC (HPLC method 1): 18.3 min. UPLC/ESI-MS: Calcd for C₃₀₅H₄₅₅N₈₆O₁₂₁P₁₉S₁₉: 8460.3; Found: 8461.8.

### Example 21. Synthesis of Oligonucleotide 125 (All-(Rp)-d[5mCs1As1Ts1G] (SEQ ID NO: 106))

[1759] Oligonucleotide 125 was synthesized as described above. RT in RP-HPLC (HPLC method 2): 16.32 min. UPLC/ESI-MS: Calcd for C₅₈H₈₅N₁₈O₂₂P₃S₃: 1575.5; Found: 1575.2.

[1760] In Examples 22 and 42 the oligonucleotide containing stereodefined methoxyethyl phosphorothioate triester internucleotidic linkages was synthesized on an ABI-394 DNA/RNA synthesizer according to the cycle summarized in Table E-5 using 1 μmol synthesis column and 0.8 μmol of oxalyl linked dC on HCP. The synthesis cycle was performed with removal of the terminal 5′-O-DMTr group (DMT Off). The solid support was washed with dry ACN and dried under a flux of argon. The dry HCP was placed in a plastic vial and was treated with 1 mL of dry propylamine in dry pyridine (in a 1:4 ratio) for a period of 18 h at r.t. The solvents were then evaporated and the residue was re-suspended with ˜pH 1.5 aqueous solution containing 10% DMSO and the HCP support was filtered off. The crude product is purified by reverse phase preparative HPLC (Gradient of 5 to 65% ACN in 20 mM sodium phosphate buffer, pH=6.0). The fractions having purity above 95% are pooled, concentrated and desalted by reverse-phase HPLC (Gradient of 0 to 80% ACN). The final desalted product is lyophilized from water.

TABLE E-5
Summary for Oligonucleotide Synthesis on a DNA/RNA Synthesizer ABI-394
Used for the Synthesis of Examples 22 and 42.

| | | | delivery time | wait time |
|---|---|---|---|---|
| step | reaction | reagent | (sec) | (sec) |
| 1 | detritylation | 3% TCA in DCM | 3 + 60 + 10 | N.A. |
| 2 | coupling | 0.15M phosphoramidite in ACN + 1.2M CMPT | 5 + 4 | 30 + 600 |
| | | in ACN | | |
| 3 | capping 1 | 5% Pac₂O in THF/2,6-lutidine | 20 | 60 |
| 4 | capping 2 | 5% Pac₂O in THF/2,6-lutidine + 16% NMI in THF | 20 | 60 |
| 5 | sulfurization | 0.3M S-MOE Toluylthiosulfonate | 10 + 4 × 2 | 300 + 3 × |
| | | | | 150 + 600 |
| | | [chemical structure] | | |

### Example 22. Synthesis of Oligonucleotide 126 (All-(Rp)-d[Cs2As2Gs2T]

[chemical structure]

[1762] Oligonucleotide 126 was synthesized as described above. RT in RP-HPLC (HPLC method 2): 16.23 min. UPLC/ESI-MS: Calcd for C₄₈H₆₈N₁₅O₂₂P₃S₃: 1396.2; Found: 1395.2.

[1763] Example 23: The oligonucleotide containing stereodefined N-methylpiperazino bulky ester phosphorothioate triester internucleotidic linkages was synthesized on an ABI-394 DNA/RNA synthesizer according to the cycle summarized in Table E-6 using 1 μmol synthesis column and 1.5 μmol of oxalyl linked dT on HCP. The synthesis cycle was performed with removal of the terminal 5′-O-DMTr group (DMT Off). The solid support was washed with dry ACN and dried under a flux of argon. The dry HCP was placed in a plastic vial and was treated with 1 mL of dry propylamine in dry pyridine (in a 1:4 ratio) for a period of 18 h at r.t. The solvents were then evaporated and the residue was re-suspended with ˜pH 1.5 aqueous solution containing 10% DMSO and the HCP support was filtered off. The crude product was purified by reverse phase preparative HPLC (Gradient of 5 to 65% ACN in 20 mM sodium phosphate buffer, pH=6.0). The fractions having purity above 95% were pooled, concentrated and desalted by reverse-phase HPLC (Gradient of 0 to 80% ACN). The final desalted product was lyophilized from water,

TABLE E-6
Summary for Oligonucleotide Synthesis on a DNA/RNA Synthesizer ABI-394
Used for the Synthesis of Example 23.

| | | | delivery time | wait time |
|---|---|---|---|---|
| step | reaction | reagent | (sec) | (sec) |
| 1 | detritylation | 3% TCA in DCM | 3 + 60 + 10 | N.A. |
| 2 | coupling | 0.15M phosphoramidite in ACN + 1.2M CMPT in ACN | 5 + 4 | 30 + 600 |
| 3 | capping 1 | 5% Pac₂O in THF/2,6-lutidine | 20 | 60 |
| 4 | capping 2 | 5% Pac₂O in THF/2,6-lutidine + 16% NMI in THF | 20 | 60 |
| 5 | sulfurization | 0.3M N-Methyl Piperazino ester PhenylThioSulfonate | 10 + 4 × 2 | 300 + 3 × |
| | | | | 150 + 600 |
| | | [chemical structure] | | |

### Example 23. Synthesis of Oligonucleotide 127 (All-(Rp)-d[Cs3As3Gs3T]

[chemical structure]

[1765] Oligonucleotide 127 was synthesized as described above. RT in RP-HPLC (HPLC method 2): 20.24 min. UPLC/ESI-MS: Calcd for C₇₈H₁₂₂N₂₁O₂₅P₃S₃: 1943.1; Found: 1941.0.

[1766] Examples 24 and 43 The oligonucleotide containing stereodefined morpholino bulky ester phosphorothioate triester internucleotidic linkages was synthesized on an ABI-394 DNA/RNA synthesizer according to the cycle summarized in Table E-7 using 1 μmol synthesis column and 1.5 μmol of oxalyl linked dT on HCP. The synthesis cycle was performed with removal of the terminal 5′-O-DMTr group (DMT Off). The solid support was washed with dry ACN and dried under a flux of argon. The dry HCP was placed in a plastic vial and was treated with 1 mL of dry propylamine in dry pyridine (in a 1:4 ratio) for a period of 18 h at r.t. The solvents were then evaporated and the residue was re-suspended with ˜pH 1.5 aqueous solution containing 10% DMSO and the HCP support was filtered off. The crude product is purified by reverse phase preparative HPLC (Gradient of 5 to 65% ACN in 20 mM sodium phosphate buffer, pH=6.0). The fractions having purity above 95% are pooled, concentrated and desalted by reverse-phase HPLC (Gradient of 0 to 80% ACN). The final desalted product is lyophilized from water.

TABLE E-7
Summary for Oligonucleotide Synthesis on a DNA/RNA Synthesizer ABI-394
Used for the Synthesis of Examples 24 and 43.

| | | | delivery time | wait time |
|---|---|---|---|---|
| step | reaction | reagent | (sec) | (sec) |
| 1 | detritylation | 3% TCA in DCM | 3 + 60 + 10 | N.A. |
| 2 | coupling | 0.15M phosphoramidite in ACN + 1.2M CMPT in ACN | 5 + 4 | 30 + 600 |
| 3 | capping 1 | 5% Pac₂O in THF/2,6-lutidine | 20 | 60 |
| 4 | capping 2 | 5% Pac₂O in THF/2,6-lutidine + 16% NMI in THF | 20 | 60 |
| 5 | sulfurization | 0.3M morpholino ester NitroPhenylThioSulfonate | 10 + 4 × 2 | 300 + 3 × |
| | | | | 150 + 600 |
| | | [chemical structure] | | |

### Example 24. Synthesis of Oligonucleotide 128 (All-(SD)-d[Cs4As4Gs4T]

[chemical structure]

[1768] Oligonucleotide 128 was synthesized as described above. RT in RP-HPLC (HPLC method 3): 19.75 min. UPLC/ESI-MS: Calcd for C₇₅H₁₁₃N₁₈O₂₈P₃S₃: 1902.9; Found: 1904.0.

[1769] Example 25: The oligonucleotide containing stereodefined dimethylaminoethyl phosphorothioate triester internucleotidic linkages was synthesized on an ABI-394 DNA/RNA synthesizer according to the cycle summarized in Table E-8 using 1 μmol synthesis column and 1.5 μmol of oxalyl linked dT on HCP. The synthesis cycle was performed with removal of the terminal 5′-O-DMTr group (DMT Off). The solid support was washed with dry ACN and dried under a flux of argon. The dry HCP was placed in a plastic vial and was treated with 1 mL of dry propylamine in dry pyridine (in a 1:4 ratio) for a period of 18 h at r.t. The solvents were then evaporated and the residue was re-suspended with ˜pH 1.5 aqueous solution containing 10% DMSO and the HCP support was filtered off. The crude product was purified by reverse phase preparative HPLC (Gradient of 5 to 65% ACN in 20 mM sodium phosphate buffer, pH=6.0). The fractions having purity above 95% were pooled, concentrated and desalted by reverse-phase HPLC (Gradient of 0 to 80% ACN). The final desalted product was lyophilized from water.

TABLE E-8
Summary for Oligonucleotide Synthesis on a DNA/RNA Synthesizer ABI-394
Used for the Synthesis of Example 25.

| | | | delivery time | wait time |
|---|---|---|---|---|
| step | reaction | reagent | (sec) | (sec) |
| 1 | detritylation | 3% TCA in DCM | 3 + 60 + 10 | N.A. |
| 2 | coupling | 0.15M phosphoramidite in ACN + 1.2M CMPT | 5 + 4 | 30 + 600 |
| | | in ACN | | |
| 3 | capping 1 | 5% Pac₂O in THF/2,6-lutidine | 20 | 60 |
| 4 | capping 2 | 5% Pac₂O in THF/2,6-lutidine + 16% NMI in THF | 20 | 60 |
| 5 | sulfurization | 0.3M dimethylaminoethyl-ToluylThioSulfonate | 10 + 4 × 2 | 900 + 3 × |
| | | | | 600 + 900 |
| | | [chemical structure] | | |

### Example 25. Synthesis of Oligonucleotide 129 (All-(S)-d[Cs5As5Gs5T]

[chemical structure]

[1771] Oligonucleotide 129 was synthesized as described above. RT in RP-HPLC (HPLC method 2): 17.25 min. UPLC/ESI-MS: Calcd for C₅₁H₇₇N₁₈O₁₉P₃S₃: 1435.4; Found: 1435.0.

[1772] Example 26: The oligonucleotide containing stereodefined dimethylalanine ester phosphorothioate triester internucleotidic linkages was synthesized on an ABI-394 DNA/RNA synthesizer according to the cycle summarized in Table E-9using 1 μmol synthesis column and 1.5 μmol of oxalyl linked dT on HCP. The synthesis cycle was performed with removal of the terminal 5′-O-DMTr group (DMT Off). The solid support was washed with dry ACN and dried under a flux of argon. The dry HCP was placed in a plastic vial and was treated with 1 mL of dry propylamine in dry pyridine (in a 1:4 ratio) for a period of 18 h at r.t. The solvents were then evaporated and the residue was re-suspended with ˜pH 1.5 aqueous solution containing 10% DMSO and the HCP support was filtered off. The crude product is purified by reverse phase preparative HPLC (Gradient of 5 to 65% ACN in 20 mM sodium phosphate buffer, pH=6.0). The fractions having purity above 95% are pooled, concentrated and desalted by reverse-phase HPLC (Gradient of 0 to 80% ACN). The final desalted product is lyophilized from water.

TABLE E-9
Summary for Oligonucleotide Synthesis on a DNA/RNA Synthesizer ABI-394
Used for the Synthesis of Example 26.

| | | | delivery time | wait time |
|---|---|---|---|---|
| step | reaction | reagent | (sec) | (sec) |
| 1 | detritylation | 3% TCA in DCM | 3 + 60 + 10 | N.A. |
| 2 | coupling | 0.15M phosphoramidite in ACN + 1.2M CMPT in ACN | 5 + 4 | 30 + 600 |
| 3 | capping 1 | 5% Pac₂O in THF/2,6-lutidine | 20 | 60 |
| 4 | capping 2 | 5% Pac₂O in THF/2,6-lutidine + 16% NMI in THF | 20 | 60 |
| 5 | sulfurization | 0.3M dimethylalanine-Fmoc ester NitroPhenylThioSulfonate | 10 + 4 × 2 | 900 + 3 × |
| | | | | 600 + 900 |
| | | [chemical structure] | | |

### Example 26. Synthesis of Oligonucleotide 130 (All-(SD)-d[Cs6As6Gs6T]

[chemical structure]

[1774] Oligonucleotide 130 was synthesized as described above. RT in RP-HPLC (HPLC method 2): 16.45 min. UPLC/ESI-MS: Calcd for C₅₇H₈₃N₁₈O₂₅P₃S₃: 1609.5; Found: 1609.6.

[1775] Examples 27 and 28: The oligonucleotide containing stereodefined S-methyl phosphorothioate triester internucleotidic linkages was synthesized on an ABI-394 DNA/RNA synthesizer according to the cycle summarized in Table E-10 using 1 μmol synthesis column and 0.8 μmol of oxalyl linked dC on HCP. The synthesis cycle was performed with removal of the terminal 5′-O-DMTr group (DMT Off). The solid support was washed with dry ACN and dried under a flux of argon. The dry HCP was placed in a plastic vial and was treated with 1 mL of dry propylamine in dry pyridine (in a 1:4 ratio) with 50% DMSO for a period of 18 h at r.t. The solvents were then evaporated and the residue was re-suspended with ˜pH 1.5 aqueous solution containing 10% DMSO and the HCP support was filtered off. The crude product is purified by reverse phase preparative HPLC (Gradient of 5 to 65% ACN in 20 mM sodium phosphate buffer, pH=6.0). The fractions having purity above 95% are pooled, concentrated and desalted by reverse-phase HPLC (Gradient of 0 to 80% ACN). The final desalted product is lyophilized from water.

TABLE E-10
Summary for Oligonucleotide Synthesis on a DNA/RNA Synthesizer ABI-394
Used for the Synthesis of Examples 27 and 28.

| | | | delivery time | wait time |
|---|---|---|---|---|
| step | reaction | reagent | (sec) | (sec) |
| 1 | detritylation | 3% TCA in DCM | 3 + 60 + 10 | N.A. |
| 2 | coupling | 0.15M phosphoramidite in | 5 + 4 | 30 + 600 |
| | | ACN + 1.2M CMPT in ACN | | |
| 3 | capping 1 | 5% Pac₂O in THF/2,6-lutidine | 20 | 60 |
| 4 | capping 2 | 5% Pac₂O in THF/2,6-lutidine + | 20 | 60 |
| | | 16% NMI in THF | | |
| 5 | sulfurization | 0.3M S-methyl | 10 + 4 × 2 | 300 + 3 × 150 + |
| | | NitroPhenylThioSulfonate | | 600 |
| | | [chemical structure] | | |

### Example 27. Synthesis of Oligonucleotide 131 (All-(Rp)-d[Gs7Cs7Cs7Ts7Cs7As7Gs7Ts7Cs7Ts7Gs7Cs7Ts7Ts7Cs7Gs7Cs7As7Cs7C] (SEQ ID NO: 106)

[chemical structure]

[1777] Oligonucleotide 131 was synthesized as described above. RT in RP-HPLC: 27.65 min. UPLC/ESI-MS: Calcd for C₂₁₀H₂₈₄N₆₇O₁₀₂P₁₉S₁₉: 6576.71; Found: 6575. 6.

### Example 28. Synthesis of Oligonucleotide 132 (All-(Sp)-d[Gs7Cs7Cs7Ts7Cs7As7Gs7Ts7Cs7Ts7Gs7Cs7Ts7Ts7Cs7Gs7Cs7As7Cs7C] (SEQ ID NO: 106)

[chemical structure]

[1779] Oligonucleotide 132 was synthesized as described above. RT in RP-HPLC: 32.65 min. UPLC/ESI-MS: Calcd for C₂₁₀H₂₈₄N₆₇O₁₀₂P₁₉S₁₉: 6576.71; Found: 6574.8.

### Synthesis of Chirally Controlled Oligonucleotides Comprising Modified Nucleobases

[1780] As generally described above and herein, in some embodiments, the present invention provides chirally controlled oligonucleotides comprising oligonucleotides other than A, T, C and G. In some embodiments, such chirally controlled oligonucleotides comprise 5-methylcytosine (5mC). Non-limiting examples are presented in Examples 21 and below.

[1781] Examples 29-41 were synthesized using the automated synthesis on ABI-394 DNA/RNA synthesizer according to the synthetic cycle summarized on Table E-11, using 1 μmol synthesis column and 1.75 μmol of oxalyl linked dG on HCP. The synthesis cycle was performed with removal of the terminal 5′-O-DMTr group (DMT Off). After completion of the automated oligonucleotide synthesis, the HCP support was washed with dry ACN and dried under vacuum. The dry HCP was placed in a plastic vial and was treated with 1 mL of dry propylamine in dry pyridine (in a 1:4 ratio) for a period of 18 h at r.t. The solvents were then evaporated and the residue was re-suspended with ˜pH 1.5 aqueous solution containing 10% DMSO and the HCP support was filtered off. The crude product is purified by reverse phase preparative HPLC (According to the procedure described below). The fractions having purity above 95% are pooled, concentrated and desalted by reverse-phase HPLC (Gradient of 0 to 30% ACN). The final desalted product is lyophilized from water.

TABLE E-11
Summary for Oligonucleotide Synthesis on a DNA/RNA
Synthesizer ABI-394 Used for the Synthesis of Examples 29-41.

| | | | delivery time | |
|---|---|---|---|---|
| step | reaction | reagent | (sec) | wait time (sec) |
| 1 | detritylation | 3% TCA in DCM | 3 + 60 + 10 | N.A. |
| 2 | coupling | 0.15M phosphoramidite in | 5 + 4 | 30 + 600 |
| | | ACN + 1.2M CMPT in ACN | | |
| 3 | capping 1 | 5% Pac₂O in THF/2,6-lutidine | 20 | 60 |
| 4 | capping 2 | 5% Pac₂O in THF/2,6-lutidine + | 20 | 60 |
| | | 16% NMI in THF | | |
| 5 | sulfurization | 0.3M S-Morpholinoethyl | 10 + 4 × 2 | 300 + 3 × 150 + |
| | | ToluylThioSulfonate | | 600 |
| | | [chemical structure] in ACN/BSTFA | | |

### General Purification Method for Examples 29-41:

[1782] Buffer A: 20 mM Phosphate pH=6.0 (adjusted with phosphoric acid)

### Buffer B: ACN

[1783] Column: XBridge Prep C₁₈, 5 μm, C₁₈, 250×10 mm, Part #186003256
Buffer heater set temperature=50° C.
Signal monitored at 254 and 280 nm

### Gradient Used:

| Time | Flow (ml/min) | % A | % B | Curve |
|---|---|---|---|---|
| Initial | | 99 | 1 | |
| 5 | 4 | 99 | 1 | 1 |
| 10 | 4 | 77 | 23 | 6 |
| 60 | 4 | 70 | 30 | 6 |
| 65 | 4 | 20 | 80 | 6 |
| 70 | 4 | 20 | 80 | 6 |
| 71 | 4 | 99 | 1 | 6 |
| 80 | 4 | 99 | 1 | 1 |

### Example 29. Synthesis of Oligonucleotide 135 (All-(Rp)-d[5mCs1As1Gs1Ts15mCs1Ts1Gs15mCs1Ts1Ts15mCs1G] (SEQ ID NO: 108))

[1785] Oligonucleotide 135 was synthesized as described above. RT in RP-HPLC (HPLC method 1): 17.50 min. UPLC/ESI-MS: Calcd for C₁₈₆H₂₇₈N₅₁O₇₃P₁₁S₁₁: 5090.0; Found: 5091.9.

### Example 30. Synthesis of Oligonucleotide 136 (All-(Sp)-d[5mCs1As1Gs1Ts15mCs1Ts1Gs15mCs1Ts1Ts15mCs1G] (SEQ ID NO: 108))

[1786] Oligonucleotide 136 was synthesized as described above. RT in RP-HPLC (HPLC method 1): 19.25 min. UPLC/ESI-MS: Calcd for C₁₈₆H₂₇₈N₅₁O₇₃P₁₁S₁₁: 5090.0; Found: 5090.8.

### Example 31. Synthesis of Oligonucleotide 137 ((Sp, Rp, Rp, Rp, Rp, Rp, Rp, Rp, Rp, Rp, Sp)-d[5mCs1As1Gs1Ts15mCs1Ts1Gs15mCs1Ts1Ts15mCs1G] (SEQ ID NO: 108) (1S-9R-1S))

[1787] Oligonucleotide 137 was synthesized as described above. RT in RP-HPLC (HPLC method 1): 17.85 min. UPLC/ESI-MS: Calcd for C₁₈₆H₂₇₈N₅₁O₇₃P₁₁S₁₁: 5090.0; Found: 5091.9.

### Example 32. Synthesis of Oligonucleotide 138 ((Sp, Sp, Rp, Rp, Rp, Rp, Rp, Rp, Rp, Sp, Sp)-d[5mCs1As1Gs1Ts15mCs1Ts1Gs15mCs1Ts1Ts15mCs1G] (SEQ ID NO: 108) (2S-7R-2S))

[1788] Oligonucleotide 138 was synthesized as described above. RT in RP-HPLC (HPLC method 1): 18.10 min. UPLC/ESI-MS: Calcd for C₁₈₆H₂₇₈N₅₁O₇₃P₁₁S₁₁: 5090.0; Found: 5091.9.

### Example 33. Synthesis of Oligonucleotide 139 ((Rp, Sp, Sp, Sp, Sp, Sp, Sp, Sp, Sp, Sp, Rp)-d[5mCs1As1Gs1Ts15mCs1Ts1Gs15mCs1Ts1Ts15mCs1G] (SEQ ID NO: 108) (1R-9S-1R))

[1789] Oligonucleotide 139 was synthesized as described above. RT in RP-HPLC (HPLC method 1): 18.75 min. UPLC/ESI-MS: Calcd for C₁₈₆H₂₇₈N₅₁O₇₃P₁₁S₁₁: 5090.0; Found: 5088.9.

### Example 34. Synthesis of Oligonucleotide 140 ((Rp, Rp, Sp, Sp, Sp, Sp, Sp, Sp, Sp, Rp, Rp)-d[5mCs1As1Gs1Ts15mCs1Ts1Gs15mCs1Ts1Ts15mCs1G] (SEQ ID NO: 108) (2R-7S-2R))

[1790] Oligonucleotide 140 was synthesized as described above. RT in RP-HPLC (HPLC method 1): 18.72 min. UPLC/ESI-MS: Calcd for C₁₈₆H₂₇₈N₅₁O₇₃P₁₁S₁₁: 5090.0; Found: 5091.3.

### Example 35. Synthesis of Oligonucleotide 141 ((Sp, Sp, Sp, Rp, Rp, Rp, Rp, Rp, Sp, Sp, Sp)-d[5mCs1As1Gs1Ts15mCs1Ts1Gs15mCs1Ts1Ts15mCs1G] (SEQ ID NO: 108) (3S-5R-3S))

[1791] Oligonucleotide 141 was synthesized as described above. RT in RP-HPLC (HPLC method 1): 18.09 min. UPLC/ESI-MS: Calcd for C₁₈₆H₂₇₈N₅₁O₇₃P₁₁S₁₁: 5090.0; Found: 5090.9.

### Example 36. Synthesis of Oligonucleotide 142 ((Rp, Rp, Rp, Sp, Sp, Sp, Sp, Sp, Rp, Rp, Rp)-d[5mCs1As1Gs1Ts15mCs1Ts1Gs15mCs1Ts1Ts15mCs1G] (SEQ ID NO: 108) (3R-5S-3R))

[1792] Oligonucleotide 142 was synthesized as described above. RT in RP-HPLC: 18.35 min. UPLC/ESI-MS (HPLC method 1): Calcd for C₁₈₆H₂₇₈N₅₁O₇₃P₁₁S₁₁: 5090.0; Found: 5088.9.

### Example 37. Synthesis of Oligonucleotide 143 ((Sp, Sp, Rp, Sp, Sp, Rp, Sp, Sp, Rp, Sp, Sp)-d[5mCs1As1Gs1Ts15mCs1Ts1Gs15mCs1Ts1Ts15mCs1G] (SEQ ID NO: 108) ((SSR)₃-SS))

[1793] Oligonucleotide 143 was synthesized as described above. RT in RP-HPLC (HPLC method 1): 18.48 min. UPLC/ESI-MS: Calcd for C₁₈₆H₂₇₈N₅₁O₇₃P₁₁S₁₁: 5090.0; Found: 5092.0.

### Example 38. Synthesis of Oligonucleotide 144 ((Rp, Rp, Sp, Rp, Rp, Sp, Rp, Rp, Sp, Rp, Rp)-d[5mCs1As1Gs1Ts15mCs1Ts1Gs15mCs1Ts1Ts15mCs1G] (SEQ ID NO: 108) ((RRS)₃-RR))

[1794] Oligonucleotide 144 was synthesized as described above. RT in RP-HPLC (HPLC method 1): 18.02 min. UPLC/ESI-MS: Calcd for C₁₈₆H₂₇₈N₅₁O₇₃P₁₁S₁₁: 5090.0; Found: 5091.4.

### Example 39. Synthesis of Oligonucleotide 145 (All-(Rp)-d[5mCs1Ts15mCs1As1Gs1Ts15mCs1Ts1Gs15mCs1Ts1Ts15mCs1Gs15mC] (SEQ ID NO: 108))

[1795] Oligonucleotide 145 was synthesized as described above. RT in RP-HPLC (HPLC method 1): 17.30 min. UPLC/ESI-MS: Calcd for C₂₃₄H₃₅₂N₆₂O₉₂P₁₄S₁₄: 6388.3; Found: 6390.6.

### Example 40. Synthesis of Oligonucleotide 146 (All-(R)-d[Gs15mCs1Ts1G])

[1796] Oligonucleotide 146 was synthesized as described above. RT in RP-HPLC (HPLC method 2): 15.89 min. UPLC/ESI-MS: Calcd for C₅₈H₈₅N₁₈O₂₃P₃S₃: 1591.5; Found: 1590.8.

### Example 41. Synthesis of Oligonucleotide 147 (All-(Rp)-d[5mCs1As1Gs1T])

[1797] Oligonucleotide 147 was synthesized as described above. RT in RP-HPLC (HPLC method 2): 16.30 min. UPLC/ESI-MS: Calcd for C₅₈H₈₅N₁₈O₂₂P₃S₃: 1575.5; Found: 1575.2.

### Example 42. Synthesis of Oligonucleotide 148 (All-(Rp)-d[5mCs2As2Gs2Ts25mCs2Ts2Gs25mCs2Ts2Ts25mCs2G] (SEQ ID NO: 108))

[1798] Oligonucleotide 148 was synthesized as described above, using the sulfurization reagent in Example 22. RT in RP-HPLC (HPLC method 3): 16.51 min. UPLC/ESI-MS: Calcd for C₁₅₃H₂₂₃N₄₀O₇₃P₁₁S₁₁: 4484.1; Found: 4483.0.

### Example 43. Synthesis of Oligonucleotide 149 (All-(Rp)-d[5mCs4As4Gs4Ts45mCs4Ts4Gs45mCs4Ts4Ts45mCs4G] (SEQ ID NO: 108))

[1799] Oligonucleotide 149 was synthesized as described above, using the sulfurization reagent in Example 24. RT in RP-HPLC (HPLC method 4): 17.87 min. UPLC/ESI-MS: Calcd for C₂₅₂H₃₈₈N₅₁O₉₅P₁₁S₁₁: 6345.6; Found: 6346.5.

### Synthesis of Chirally Controlled Chimeric Oligonucleotides Comprising Different Internucleotidic Linkages

[1800] As generally described above and herein, in some embodiments, the present invention provides chirally controlled oligonucleotide comprising different internucleotidic linkages. The non-limiting examples below illustrate such chirally controlled oligonucleotides, and the methods of synthesizing the same.

[1801] Examples 44-45 illustrate the synthesis of chirally controlled chimeric oligonucleotide comprising different internucleotidic linkages. The oligonucleotides containing mixed diastereomerically pure morpholinoethyl phosphorothioate triester/phosphorothioate diester internucleotidic linkages were synthesized on an ABI-394 DNA/RNA synthesizer according to the cycle summarized in Table E-12 using 1 μmol synthesis column and 1.5 μmol of oxalyl linked dT on HCP. As each iterative cycle allows for a different sulfurization reagent to be reacted, two different thiosulfonates were used. The synthesis was performed with removal of the terminal 5′-O-DMTr group (DMT Off). The solid support was washed with dry ACN and dried under a flux of argon. The dry solid support was then treated with 5 mL of anhydrous 1 M solution of 1,5-diazabicyclo(4.3.0)non-5-ene (DBN) in dry ACN-trimethylsilyl chloride—16:1 (v/v) for 10 min at r.t. The DBN solution was slowly pushed through the column by means of a plastic luer syringe fixed to the outlet of the column. The support was then washed with dry ACN and dried under vacuum. The dry HCP was placed in a plastic vial and was treated with 1 mL of dry propylamine in dry pyridine (in a 1:4 ratio) for a period of 18 h at r.t. The solvents were then evaporated and the residue was re-suspended with ˜pH 1.5 aqueous solution containing 10% DMSO and the HCP support was filtered off. The crude product is purified by reverse phase preparative HPLC (Gradient of 5 to 65% ACN in 20 mM sodium phosphate buffer, pH=6.0). The fractions having purity above 95% are pooled, concentrated and desalted by reverse-phase HPLC (Gradient of 0 to 80% ACN). The final desalted product is lyophilized from water.

TABLE E-12
Summary for Oligonucleotide Synthesis on a DNA/RNA Synthesizer ABI-394
Used for the Synthesis of Examples 44-45.

| | | | delivery time | |
|---|---|---|---|---|
| step | reaction | reagent | (sec) | wait time (sec) |
| 1 | detritylation | 3% TCA in DCM | 3 + 60 + 10 | N.A. |
| 2 | coupling | 0.15M phosphoramidite in | 5 + 4 | 30 + 600 |
| | | ACN + 1.2M CMPT in ACN | | |
| 3 | capping 1 | 5% Pac₂O in THF/2,6-lutidine | 20 | 60 |
| 4 | capping 2 | 5% Pac₂O in THF/2,6-lutidine + | 20 | 60 |
| | | 16% NMI in THF | | |
| 5 | sulfurization | 0.3M S-Morpholinoethyl | 10 + 4 × 2 | 300 + 3 × 150 + |
| | 1 | Toluylthiosulfonate | | 600 |
| | | [chemical structure] in ACN/BSTFA | | |
| 6 | sulfurization | 0.3M S-cyanoethyl | 10 + 4 × 2 | 300 + 3 × 150 + |
| | 2 | Methylthiosulfonate | | 600 |
| | | [chemical structure] in ACN/BSTFA | | |

### Example 44. Synthesis of Oligonucleotide 150 (All-(Rp)-d[TsCs1AsT])

[1802] Oligonucleotide 150 was synthesized as described above. RT in RP-HPLC (HPLC method 2): 12.72 min. UPLC/ESI-MS: Calcd for C₄₅H₆₂N₁₃O₂₁P₃S₃: 1310.2; Found: 1309.2

### Example 45. Synthesis of Oligonucleotide 151 (All-(Sp)-d[Cs1AsGs1T])

[1803] Oligonucleotide 151 was synthesized as described above. RT in RP-HPLC (HPLC method 2): 14.71 min. UPLC/ESI-MS: Calcd for C₅₁H₇₂N₁₇O₂₁P₃S₃: 1448.4; Found: 1446.9.

[1804] Example 46 describes the synthesis of chirally controlled chimeric oligonucleotide comprising both phosphate diester internucleotidic linkage and modified internucleotidic linkages. The exemplary oligonucleotides containing mixed morpholinoethyl phosphorothioate triester/phosphodiester internucleotidic linkages were synthesized on an ABI-394 DNA/RNA synthesizer according to the cycle summarized in Table E-13 using 1 μmol synthesis column and 1.5 μmol of oxalyl linked dT on HCP. As each iterative cycle allows for different sulfurization or oxidation reagents to be reacted, one thiosulfonate reagent was used for sulfurization in one cycle and iodine-promoted oxidation was used in another cycle. The synthesis was performed with removal of the terminal 5′-O-DMTr group (DMT Off). The solid support was washed with dry ACN and dried under a flux of argon. The dry HCP was placed in a plastic vial and was treated with 1 mL of dry propylamine in dry pyridine (in a 1:4 ratio) for a period of 18 h at r.t. The solvents were then evaporated and the residue was re-suspended with ˜pH 1.5 aqueous solution containing 10% DMSO and the HCP support was filtered off. The crude product was purified by reverse phase preparative HPLC (Gradient of 5 to 65% ACN in 20 mM sodium phosphate buffer, pH=6.0). The fractions having purity above 95% were pooled, concentrated and desalted by reverse-phase HPLC (Gradient of 0 to 80% ACN). The final desalted product was lyophilized from water.

TABLE E-13
Summary for Oligonucleotide Synthesis on a DNA/RNA Synthesizer ABI-394
Used for the Synthesis of Example 46.

| | | | delivery time | |
|---|---|---|---|---|
| step | reaction | reagent | (sec) | wait time (sec) |
| 1 | detritylation | 3% TCA in DCM | 3 + 60 + 10 | N.A. |
| 2 | coupling | 0.15M phosphoramidite in | 5 + 4 | 30 + 600 |
| | | ACN + 1.2M CMPT in ACN | | |
| 3 | capping 1 | 5% Pac₂O in THF/2,6-lutidine | 20 | 60 |
| 4 | capping 2 | 5% Pac₂O in THF/2,6-lutidine + | 20 | 60 |
| | | 16% NMI in THF | | |
| 5 | sulfurization | 0.3M S-Morpholinoethyl | 10 + 4 × 2 | 300 + 3 × 150 + |
| | | Toluylthiosulfonate | | 600 |
| | | [chemical structure] in ACN/BSTFA | | |
| 6 | oxidation | 0.02M I₂, Pyridine/Water | 10 | 300 |

### Example 46. Synthesis of Oligonucleotide 152 (All-(SM)-d[Cs1AGs1T])

[1805] Oligonucleotide 152 was synthesized as described above. RT in RP-HPLC (HPLC method 2): 13.42 min. UPLC/ESI-MS: Calcd for C₅₁H₇₂N₁₇O₂₂P₃S₂: 1432.3; Found: 1431.7.

[1806] Example 47 describes the synthesis of chirally controlled chimeric oligonucleotide comprising a phosphodiester internucleotidic linkage and both modified chirally pure phosphotriester and phosphodiester internucleotidic linkages. The chirally controlled oligonucleotides containing mixed morpholinoethyl phosphorothioate triester/phosphodiester/phosphorothioate diester linkages were synthesized on an ABI-394 DNA/RNA synthesizer according to the cycle summarized in Table E-14 using 1 μmol synthesis column and 1.5 μmol of oxalyl linked dT on HCP. As each iterative cycle allows for different sulfurization or oxidation reagents to be reacted, two different thiosulfonate reagents were used for the two different sulfurization cycles and iodine-promoted oxidation was used for another cycle. The synthesis was performed with removal of the terminal 5′-O-DMTr group (DMT Off). The solid support was washed with dry ACN and dried under a flux of argon. The dry solid support was then treated with 5 mL of anhydrous 1 M solution of 1,5-diazabicyclo(4.3.0)non-5-ene (DBN) in dry ACN-trimethylsilyl chloride—16:1 (v/v) for 10 min at r.t. The DBN solution was slowly pushed through the column by means of a plastic luer syringe fixed to the outlet of the column. The support was then washed with dry ACN and dried under vacuum. The dry HCP was placed in a plastic vial and was treated with 1 mL of dry propylamine in dry pyridine (in a 1:4 ratio) for a period of 18 h at r.t. The solvents were then evaporated and the residue was re-suspended with ˜pH 1.5 aqueous solution containing 10% DMSO and the HCP support was filtered off. The crude product was purified by reverse phase preparative HPLC (Gradient of 5 to 65% ACN in 20 mM sodium phosphate buffer, pH=6.0). The fractions having purity above 95% were pooled, concentrated and desalted by reverse-phase HPLC (Gradient of 0 to 80% ACN). The final desalted product was lyophilized from water.

TABLE E-14
Summary for Oligonucleotide Synthesis on a DNA/RNA
Synthesizer ABI-394 Used for the Synthesis of Example 47.

| | | | delivery time | wait time |
|---|---|---|---|---|
| step | reaction | reagent | (sec) | (sec) |
| 1 | detritylation | 3% TCA in DCM | 3 + 60 + 10 | N.A. |
| 2 | coupling | 0.15M phosphoramidite in | 5 + 4 | 30 + 600 |
| | | ACN + 1.2M CMPT in ACN | | |
| 3 | capping 1 | 5% Pac₂O in THF/2,6-lutidine | 20 | 60 |
| 4 | capping 2 | 5% Pac₂O in THF/2,6-lutidine + | 20 | 60 |
| | | 16% NMI in THF | | |
| 5 | sulfurization | 0.3M S-cyanoethyl | 10 + 4 × 2 | 300 + 3 × 150 + |
| | 1 | MethylThioSulfonate | | 600 |
| | | [chemical structure] in ACN/BSTFA | | |
| 6 | sulfurization | 0.3M S-Morpholinoethyl | 10 + 4 × 2 | 300 + 3 × 150 + |
| | 2 | ToluylThioSulfonate | | 600 |
| | | [chemical structure] in ACN/BSTFA | | |
| 7 | oxidation | 0.02M I₂, Pyridine/Water | 10 | 300 |

### Example 47. Synthesis of Oligonucleotide 153 (All-(Sp)-d[CAs1GsT])

[1807] Oligonucleotide 153 was synthesized as described above. RT in RP-HPLC (HPLC method 2): 11.48 min. UPLC/ESI-MS: Calcd for C₄₅H₆₁N₁₆O₂₁P₃S₂: 1318.1; Found: 1318.1.

[1808] As will be appreciated by a person skilled in the art, following examples 46 and 47, and other examples and methods described herein, longer chimeric chirally controlled oligonucleotides can be prepared.

Chirally Pure Oligonucleotides have Different Properties than the Mixture of Diastereomers from Non-Stereospecific Synthesis

[1809] As described above and herein, in some embodiments, the present application provides chirally pure oligonucleotides that have different chemical and biological properties than the mixture of diastereomers with the same base sequence but synthesized through non-stereospecific oligonucleotide synthesis.

### Example 48. HPLC Profile of Chirally Pure Oligonucleotides and Mixture of Diastereomers from Non-Stereospecific Synthesis

[1810] Chirally pure phosphorothioate diester oligonucleotides A (Full R_{P}, Oligonucleotide 101) and B (Full S_{P}, Oligonucleotide 102) and non-stereospecific C (stereorandom phosphorothioate diester internucleotidic linkages), which was made by standard non-stereospecific oligonucleotide synthesis, were analyzed by the same RP-HPLC conditions and the corresponding HPLC traces are represented on FIG. 2.

[1811] As clearly demonstrated in FIG. 2, the stereochemistry of the phosphorothioate diester 20-mer oligonucleotides affects their behavior as determined by RP-HPLC and IEX-HPLC. Without the intention to be limited by theory, a correlation is observed between the retention times (RT) obtained by RP-HPLC and IEX-HPLC, as RT trends are conserved. The full R_{P} stereoisomer (A) has a shorter retention than the full S_{P} stereoisomer (B), while the stereorandom phosphorothioate diester oligonucleotide (C), being a mixture of all 2¹⁹ stereoisomers, has a broad HPLC peak, eluting between the extreme full R_{P} and full S_{P} diastereoisomers.

[1812] As will be appreciated by those skilled in the art, the presented data herewith confirm that depicted analyses comparing different chirally controlled or uncontrolled (e.g., stereorandom) oligonucleotide compositions of the same sequence show that the exemplified chirally uncontrolled oligonucleotide composition (i.e., as prepared by non-chiral controlled oligonucleotide synthesis), includes only an extremely low level of certain oligonucleotide types, such as the full Rp or Sp type.

### Example 49. Thermal Denaturation Experiment (Tm)

[1813] Each DNA strand was mixed with complementary RNA in equimolar concentration of 0.5 μM in 1×PBS. Total 2.5 ml, solution was prepared for each duplex and the mixture was heated at 90° C. for 2 min and was allowed to cool down over the course of several hours. The mixtures were then stored at 4° C. for 2 hrs. Absorbance at 254 nm was recorded at an interval of 0.5 min starting the temperature gradient from 15° C. to 90° C. with rise of 0.5° C./minute, using a Perkin Elmer UV-spectrophotometer equipped with a Peltier unit. The 254 nm absorbance was plotted against the temperature and the Tm values were calculated from the respective first derivative of each curve.

[1814] FIG. 3 illustrates the difference in Tm between two stereopure diastereoisomer phosphorothioate oligonucleotides (full R_{P} 20-mer A and full S_{P} 20-mer B) and the stereorandom phosphorothioate oligonucleotide (C). Full R_{P}phosphorothioate DNA demonstrate higher affinity towards complementary RNA when compared to both the opposite full S_{P} diastereoisomer and the stereorandom 20-mer.

[1815] Table E-15 below summarizes the differences between chirally controlled oligonucleotides and stereorandom oligonucleotide.

TABLE E-15
Differences between chirally controlled
and stereorandom oligonucleotides.

| | RT-IEX | | IC₅₀ (nM) (rounded |
|---|---|---|---|
| Oligonucleotide | (min) | Tm (° C.) ± 0.5 | up to single digit) |
| 101 | 14.70 | 68.3 | 4 |
| 102 | 15.49 | 60.5 | 6 |
| 103 | 15.10 | 63.4 | 6 |
| 104 | 15.04 | 63.5 | 4 |
| 105 | 14.75 | 66.5 | 3 |
| 106 | 15.43 | 61.8 | 4 |
| 107 | 15.02 | 64.5 | 4 |
| 108 | 15.10 | 64.8 | 3 |
| 109 | 14.91 | 65.8 | 2 |
| 110 | 15.24 | 62.9 | 7 |
| 111 | 15.69 | NA | NA |
| 113 | 15.72 | NA | NA |
| 114 | 14.14 | 65.2 | 5 |
| 115 | 14.30 | 65.2 | 3 |
| 116 | 14.17 | 64.8 | 2 |
| 118 | 15.04 | 64.5 | 3 |
| 119 | 6.90 | 73.4 | Not detected |
| 120 | 15.49 | 65.3 | 4 |

### Example 50. Biological Activity of Chirally Pure Oligonucleotides

[1816] After checking OD all oligonucleotide candidate molecules were diluted to a starting concentration of 20 μM. Multidose forward transfection experiment was setup in 96-well plates using Hep3B cells (ATCC®, Cat.HB-8064™) using Lipofectamine 2000 (Life Technologies, Cat. 11668-019) transfection reagent.

[1817] Transfection Protocol:

[1818] 2×10⁴ Hep3B cells per well were seeded and incubated for 24 hours at 37° C. in a CO₂ incubator in 100 μl of antibiotic free MEM medium (Life Technologies, Cat. 11095098) containing 10% FBS and 1% Glutamax I (Life Technologies, Cat. 35050061). Twelve dilutions were setup in nuclease free water (Table E-16).

TABLE E-16
Concentrations of oligonucleotide transfection stock plate.

| | Dilution | | | | | |
|---|---|---|---|---|---|---|
| | 1 | 2 | 3 | 4 | 5 | 6 |
| In μM | 20 | 10 | 3.33333 | 1.11111 | 0.37037 | 0.12346 |
| | Dilution | | | | | |
| | 7 | 8 | 9 | 10 | 11 | 12 |
| In μM | 0.04115 | 0.01372 | 0.00457 | 0.00152 | 0.00051 | 0.00017 |

[1819] For each well, 0.5 μL of Lipofectamine 2000 were mixed with 9.5 μL of Opti MEM I reduced serum medium (Life Technologies, Cat. 31985062) and incubated for 5 minutes. Following incubation, 10 μL of each of the candidates at the reported concentrations was mixed with the diluted Lipofectamine 2000 by gentle pipetting. The mixture was then incubated for 20 minutes at room temperature to allow for complex formation. During this time the cell growth medium was replaced with 80 μL of fresh antibiotic free MEM as previously described. 20 μL of lipid-oligo complex was gently mixed into each well bringing the total volume to 100 μL. The cells were then incubated for 24 hours at 37° C. in a CO₂ incubator.

### RNA Extraction:

[1820] After 24 hour incubation the cell growth medium was removed and RNA was extracted using a Dynabeads mRNA Direct kit (Life Technologies, Cat. 61012) per the instructions provided in the kit manual without modifications. This magnetic Oligo (dT)²⁵ bead system allows for cost-effective and robust high-throughput poly (A) RNA extraction circumventing DNAse treatment. RNA was eluted in nuclease-free water and stored at −80° C.

cDNA Synthesis:

[1821] 10 μL of RNA was used in a 20 μL cDNA synthesis reaction using a High Capacity cDNA Reverse Transcription Kit (Life Technologies, Cat. 4374967) using the kit protocol with RNAse Inhibitor. The reverse transcription was performed in a 96-well format on a C1000 Touch thermal cycler (Biorad, Cat. 185-1196EDU).

### Gene Expression Analysis:

[1822] Gene expression was measured by quantitative PCR using a LightCycler® 480 SYBR Green I Master (Roche, Cat. 04707516001) on LightCycler 480 Real-Time PCR instrument. Primers for the Homo Sapiens sequences of the target Apolipoprotein B (Apo B) (NM_000384) and endogenous control Glyceraldehyde-3-phosphate dehydrogenase (GAPDH) (NM_002046) were designed and ordered from IDT (Table E-17).

TABLE E-17
Sequences of HPLC purified primers
used for gene expression quantification.

| Primer | | | SEQ ID | |
|---|---|---|---|---|
| Name | Target | Sequence | NO: | Position |
| Apo B | H. sapiens | AGCCTTGGTG | 116 | 3209-3232 |
| Forward | Apo B | GATACCCTGA | | |
| primer | | AGTT | | |
| Apo B | H. sapiens | TGGACAAGGT | 117 | 3289-3312 |
| Reverse | Apo B | CATACTCTGC | | |
| primer | | CGAT | | |
| GAPDH | H. sapiens | CTCTGCTCCT | 118 | 30-49 |
| Forward | GAPDH | CCTGTTCGAC | | |
| primer | | | | |
| GAPDH | H. sapiens | ACGACCAAAT | 119 | 122-141 |
| Reverse | GAPDH | CCGTTGACTC | | |
| primer | | | | |

[1823] Measurement of the target and endogenous control was performed in separate wells using material from the same cDNA template. SYBR green assay PCR conditions were setup as described in the SYBR Green I Master protocol (Table E-18).

TABLE E-18
Real-time PCR conditions for SYBR green assay.

| Step | Number of Cycles |
|---|---|
| Pre-incubation | 1 |
| Amplification | 45 |
| Melting curve | 1 |
| Cooling | 1 |

| | | | | |
|---|---|---|---|---|
| | | Acquisition | | Acquisition per |
| Degrees ° C. | Time | Mode | Ramp rate ° C./s | ° C. |

Pre-incubation

| | | | | | |
|---|---|---|---|---|---|
| 95 | 5 | min | None | 4.4 | None |

Amplification

| | | | | | |
|---|---|---|---|---|---|
| 95 | 10 | sec | None | 4.4 | None |
| 60 | 10 | sec | None | 2.2 | None |
| 72 | 10 | sec | Single | 4.4 | None |

Melting Curve

| | | | | | |
|---|---|---|---|---|---|
| 95 | 5 | sec | None | 4.4 | None |
| 65 | 1 | min | None | 2.2 | None |

| | | | |
|---|---|---|---|
| 97 | Continuous | 0.11 | 5 |

Cooling

| | | | | | |
|---|---|---|---|---|---|
| 40 | 30 | sec | None | 2.2 | None |

[1824] Melt Curve Analysis show single amplicon peaks for each primer pair (FIG. 4).

[1825] The data is a result of 3 biological replicates. All samples were compared to Naïve untransfected control. The following results were observed when evaluating gene expression by real-time PCR using SYBR green (Table E-19, FIG. 5).

TABLE E-19
Complete IC₅₀ data evaluated by SYBR green.

| Oligonucleotide | IC₅₀ (nM) |
|---|---|
| 101 | 4.368 |
| All-R | |
| 102 | 6.345 |
| All-S | |
| 103 | 5.727 |
| 5R-9S-5R | |
| 104 | 4.291 |
| 5S-9R-5S | |
| 105 | 2.877 |
| 1S-17R-1S | |
| 106 | ~3.855 |
| 1R-17S-1R | |
| 107 | ~4.180 |
| (R/S)₉R | |
| 108 | 3.189 |
| (S/R)₉S | |
| 118 | 3.087 |
| Stereorandom | |
| 109 | 1.722 |
| 3S-13R-3S | |
| 110 | 7.437 |
| 3R-13S-3R | |
| 114 | 5.234 |
| 3R-13S-3R | |
| 115 | 2.689 |
| S-(RRS)₆ | |
| 116 | 1.919 |
| RS-(RRS)₅-RR | |
| 120 | 4.386 |
| Mipomersen | |

[1826] In some embodiments, provided chirally controlled oligonucleotides show an IC₅₀ below 8 nM. In some embodiments, provided chirally controlled oligonucleotides show an IC₅₀ below 7 nM. In some embodiments, provided chirally controlled oligonucleotides show an IC₅₀ below 6 nM. In some embodiments, provided chirally controlled oligonucleotides show an IC₅₀ below 5 nM. In some embodiments, provided chirally controlled oligonucleotides show an IC₅₀ below 4 nM. In some embodiments, provided chirally controlled oligonucleotides show an IC₅₀ below 3 nM. In some embodiments, provided chirally controlled oligonucleotides show an IC₅₀ below 2 nM. In some embodiments, provided chirally controlled oligonucleotides show an IC₅₀ within a range of 0.5-8 nM. In some embodiments, provided chirally controlled oligonucleotides show an IC₅₀ within a range of 1-4 nM. In some embodiments, provided chirally controlled oligonucleotides show an IC₅₀ within a range of 1.5-3 nM. In some embodiments, provided chirally controlled oligonucleotides show an IC₅₀ within a range of 1.5-2 nM. In some embodiments, provided chirally controlled oligonucleotides show an IC₅₀ within a range of 0.5-2 nM. In some embodiments, provided chirally controlled oligonucleotides show an IC₅₀ within a range of 1-2.5 nM. In some embodiments, provided chirally controlled oligonucleotides show an IC₅₀ within a range of 1.5-3 nM. In some embodiments, provided chirally controlled oligonucleotides show an IC₅₀ within a range of 2.5-5 nM. In some embodiments, provided chirally controlled oligonucleotides show an IC₅₀ within a range of 3-6 nM. In some embodiments, provided chirally controlled oligonucleotides show an IC₅₀ within a range of 5-8 nM. In some embodiments, provided chirally controlled oligonucleotides show an IC₅₀ within a range between an upper boundary and a lower boundary. In some such embodiments, the upper boundary is 8, 5, 4, or 3 nM. In some such embodiments, the lower boundary is 1, 1.5, 2, or 2.5 nM. As can be seen with reference to the Examples, the present disclosure specifically exemplifies various chirally controlled oligonucleotides or chirally controlled oligonucleotide compositions showing representative such IC₅₀ values.

[1827] Table E-19 illustrates that when test in chirally controlled form, certain chirally controlled oligonucleotides/oligonucleotide compositions are more potent than the corresponding stereorandom oligonucleotide mixture (Oligonucleotides 105, 109, 115 and 116 compared to Oligonucleotide 118); they are also more active than Mipomersen, which is a stereorandom oligonucleotide mixture (Oligonucleotides 104, 105, 106, 107, 109, 115 and 116 compared to 120).

### Additional Chirally Controlled Preparations

### Example 51. Preparation of Chirally Controlled Preparations of Oligonucleotides

[chemical structure]

[1829] The present Example describes preparation of a variety of particular chirally controlled composition of certain oligonucleotides as described herein. In particular, the present Example describes oligonucleotide preparation on utilizing loaded lcaa-CPG-500.

[1830] N⁴-Bz-5′-O-DMTr-2′-O-MOE-5mC (1) (4.0 g, 5.5 mmol) was dissolved in anhydrous DCM (20 mL) and mixed with 2 equiv of succinic anhydride (1.1 g, 11.1 mmol) and 3 equiv of 4-N,N-dimethylaminopyridine (2.0 g, 16.6 mmol). The reaction was stirred under Argon at room temperature. After complete consumption of the starting material as determined by TLC (1 hour), the solvents were evaporated to dryness, the crude residue was dissolved in DCM containing 1% triethylamine then purified by flash silica gel chromatography using a gradient of 0-2% of MeOH in DCM containing 2% triethylamine. Yield of pure compound (2) after evaporation was 4.5 g, 88%. The resulting 3′-O-succinate (2) (0.92 g, 1.0 mmol), N,N-diisopropylethylamine (0.82 ml, 5.0 mmol) and CPG-500 (10 g) were taken up in DMF (50 mL) then HBTU (0.42 g, 1.1 mmol) was added. The mixture was shaken for 2 h then filtered. The support was washed with DMF, MeOH and finally, DCM then dried in vacuo. Trityl cation analysis (monitoring at 504 nm) showed that the loading of the nucleoside on the support (3) was 63 μmol/g.

[1831] Chirally controlled compositions of oligonucleotides containing stereodefined chimeric deoxy and 2′-O-MOE phosphorothioate triester internucleotidic linkages was synthesized on MerMade-12 DNA/RNA synthesizer (BioAutomation) according to the cycle summarized in Table E-20 using a MM-6-200 synthesis column (BioAutomation) loaded with 2.0 g (126 μmol) of uncapped succinyl linked N⁴-Bz-5′-O-DMTr-2′-O-MOE-5mC (63 μmol/g, lcaa CPG-500 from Glen Research. The oligonucleotide synthesis cycle was performed with a preliminary capping step (capping 2) and without removal of the final terminal 5′-O-DMTr oligonucleotide group (DMT On). The stereospecific sulfurization steps were performed using the 0.3 M S-(2-cyanoethyl)methylthiosulfonate reagent following the coupling of the corresponding chiral phosphoramide and the two-step capping process (Table E-20).

[1832] Once the automated oligonucleotide synthesis cycle was completed with the final 5′-O-DMTr group kept On, the synthesis column was taken off the DNA/RNA synthesizer and dried under vacuum. The dried support was transferred onto an empty glass manual peptide synthesizer and 40 mL solution of 0.5 M 1,5-diazabicyclo[4.3.0]non-5-ene (DBN), 0.25 M N,O-bis(trimethylsilyl)trifluoroacetamide (BSTFA) in ACN was continuously passed through the support for 5 min without stopping the flow in the manual peptide synthesizer. The support was washed by 50% Py/ACN and dried with Argon flow for 1 sec. Then, the support was transferred into an empty screw-cap plastic vial and treated with 5% EtOH/conc NH₃ (20 mL) at 60° C. for 6 h, and left at room temperature for 12 h. The support was removed by filtration and washed with conc. NH₃. The filtrate was dried in vacuo then the resultant was dissolved in 50 mM TEAA (120 mL). Further filtration was performed when there was a suspension in the solution. The solution was loaded on a Sep-Pak cartridge (Waters, Sep-Pak Vac 35 cc (10 g) C₁₈ Cartridges). The cartridge was washed with 20% ACN/50 mM TEAA (70 mL) to remove all capped truncated sequences and 50% ACN/water containing 0.5% of conc NH₃ (50 mL) to elute the full length DMT On oligonucleotide. The solution containing the DMT On oligonucleotide was dried in vacuo then diluted with 50 mM TEAA (120 mL) and loaded on another Sep-Pak cartridge (Waters, Sep-Pak Vac 35 cc (10 g) C₁₈ Cartridges). The cartridge was washed with milli Q water (50 mL), 2% TFA/water (50 mL), then water (50 mL). The DMT Off oligonucleotide was eluted with 50% ACN/water containing 0.5% of conc NH₃ (50 mL).

TABLE E-20
Summary for Oligonucleotide Synthesis on a DNA/RNA Synthesizer
MerMade 12 Used for Chirally Controlled Synthesis.

| | | | delivery | wait |
|---|---|---|---|---|
| | | | volume | time |
| step | reaction | reagent | (mL) | (sec) |
| 1 | detritylation | 3% TCA in DCM | 3 × 10 | 3 × 24 |
| 2 | coupling | 0.15M chiral | 2 × 3.4 | 2 × 450 |
| | | phosphoramidite in ACN + | | (MOE) |
| | | 1.2M CMPT in ACN | | 2 × 300 |
| | | | | (DNA) |
| 3 | capping 1 | 5% Pac₂O in THF/2,6- | 8 | 60 |
| | | lutidine | | |
| 4 | capping 2 | 5% Pac₂O in THF/2,6- | 6.8 | 60 |
| | | lutidine + 16% NMI in THF | | |
| 5 | sulfurization | 0.3M S-(2-cyanoethyl) | 9 | 600 |
| | | methanethiosulfonate | | |
| | | [chemical structure] in ACN/BSTFA | | |

[1833] Synthesis of Oligonucleotide ONT-75 (All (Rp))-Gs5mCs5mCsTs5mCsAs GsTs5mCsTsGs5mCsTsTs5mCsGs5mCsAs5mCs5mC (SEQ ID NO: 106)

[1834] Synthesis of Oligonucleotide ONT-80 (All (Sp))-Gs5mCs5mCsTs5mCsAs GsTs5mCsTsGs5mCsTsTs5mCsGs5mCsAs5mCs5mC (SEQ ID NO: 106)

[1835] Synthesis of Oligonucleotide ONT-77 (Rp, Rp, Rp, Rp, Rp, Sp, Sp, Sp, Sp, Sp, Sp, Sp, Sp, Sp, Sp, Rp, Rp, Rp, Rp)-Gs5mCs5mCsTs5mCsAs GsTs5mCsTsGs5mCsTsTs5mCsGs5mCsAs5mCs5mC (SEQ ID NO: 106) (5R-10S-4R)

[1836] Synthesis of Oligonucleotide ONT-81 (Sp, Sp, Sp, Sp, Sp, Rp, Rp, Rp, Rp, Rp, Rp, Rp, Rp, Rp, Rp, Sp, Sp, Sp, Sp)-Gs5mCs5mCsTs5mCsAs GsTs5mCsTsGs5mCsTsTs5mCsGs5mCsAs5mCs5mC (SEQ ID NO: 106) (5S-10R-4S)

[1837] Synthesis of Oligonucleotide ONT-87 (Rp, Rp, Rp, Rp, Rp, Sp, Sp, Rp, Sp, Sp, Rp, Sp, Sp, Rp, Rp, Rp, Rp, Rp, Rp)-Gs5mCs5mCsTs5mCsAs GsTs5mCsTsGs5mCsTsTs5mCsGs5mCsAs5mCs5mC (SEQ ID NO: 106) (5R-(SSR)₃-5R)

[1838] Synthesis of Oligonucleotide ONT-88 (Sp, Sp, Sp, Sp, Sp, Rp, Rp, Sp, Rp, Rp, Sp, Rp, Rp, Sp, Sp, Sp, Sp, Sp, Sp)-Gs5mCs5mCsTs5mCsAs GsTs5mCsTsGs5mCsTsTs5mCsGs5mCsAs5mCs5mC (SEQ ID NO: 106) (5S-(RRS)₃-5S)

[1839] Synthesis of Oligonucleotide ONT-89 (Sp, Rp, Sp, Rp, Sp, Rp, Sp, Rp, Sp, Rp, Sp, Rp, Sp, Rp, Sp, Rp, Sp, Rp, Sp)-Gs5mCs5mCsTs5mCsAs GsTs5mCsTsGs5mCsTsTs5mCsGs5mCsAs5mCs5mC (SEQ ID NO: 106) ((SR)₉S)

[1840] Synthesis of Oligonucleotide ONT-82 (All (Rp))-GsTs5mCs5mCs5mCsTsGsAsAsGsAsTsGsTs5mCsAsAsTsGs5mC (SEQ ID NO: 120)

[1841] Synthesis of Oligonucleotide ONT-84 (All (Sp))-GsTs5mCs5mCs5mCsTsGsAsAsGsAsTsGsTs5mCsAsAsTsGs5mC (SEQ ID NO: 120)

[1842] Synthesis of Oligonucleotide ONT-85 (Rp, Rp, Rp, Rp, Rp, Sp, Sp, Sp, Sp, Sp, Sp, Sp, Sp, Sp, Sp, Rp, Rp, Rp, Rp)-GsTs5mCs5mCs5mCsTsGsAsAsGsAsTsGsTs5mCsAsAsTsGs5mC (SEQ ID NO: 120) (5R-10S-4R)

[1843] Synthesis of Oligonucleotide ONT-86 (Sp, Sp, Sp, Sp, Sp, Rp, Rp, Rp, Rp, Rp, Rp, Rp, Rp, Rp, Rp, Sp, Sp, Sp, Sp)-GsTs5mCs5mCs5mCsTsGsAsAsGsAsTsGsTs5mCsAsAsTsGs5mC (SEQ ID NO: 120) (5S-10R-4S)

### Example 52: General RP-HPLC Method for the Analysis of Crude DMT on and Purified DMT Off Oligonucleotides

[1844] The present Example describes RP-HPLC analysis of crude and purified oligonucleotide compositions prepared by chirally controlled synthesis as described herein.

### Buffer A: 50 mM TEAA, pH 7.0

### Buffer B: ACN

### Column: XBridge C₁₈, 3.5 μm, Cis, 4.6×50 mm, Part #186003034

[1845] Column temperature=50° C.
Signal monitored at 254 and 280 nm

### Gradient Used:

| Time(min) | Flow (mL/min) | % A | % B | Curve |
|---|---|---|---|---|
| Initial | | 99 | 1 | |
| 2 | 1 | 99 | 1 | 6 |
| 52 | 1 | 50 | 50 | 6 |
| 55 | 1 | 5 | 95 | 6 |
| 55.5 | 1 | 5 | 95 | 6 |
| 56 | 1 | 99 | 1 | 6 |
| 60 | 1 | 99 | 1 | 1 |

| | SEQ. | |
|---|---|---|
| | ID | FIG. |
| RP-HPLC of Crude DMT on: | NO: | 35: |
| ONT-75 (All (Rp))-Gs5mCs5mCsTs5mCsAs | 106 | (Panel A) |
| GsTs5mCsTsGs5mCsTsTs5mCsGs5mCsAs 5mCs5mC | | |
| ONT-80 (All (Sp))-Gs5mCs5mCsTs5mCsAs | 106 | (Panel B) |
| GsTs5mCsTsGs5mCsTsTs5mCsGs5mCsAs 5mCs5mC | | |
| ONT-77: (Rp, Rp, Rp, Rp, Rp, Sp, Sp, Sp, Sp, Sp, Sp, Sp, Sp, Sp, Sp, Rp, Rp, | 106 | (Panel C) |
| Rp, Rp)-Gs5mCs5mCsTs5mCsAs GsTs5mCsTsGs5mCsTsTs5mCsGs5mCsAs | | |
| 5mCs5mC (5R-10S-4R) | | |
| ONT-81 (Sp, Sp, Sp, Sp, Sp, Rp, Rp, Rp, Rp, Rp, Rp, Rp, Rp, Rp, Rp, Sp, Sp, | 106 | (Panel D) |
| Sp,Sp)-Gs5mCs5mCsTs5mCsAs GsTs5mCsTsGs5mCsTsTs5mCsGs5mCsAs | | |
| 5mCs5mC (5S-10R-4S) | | |
| ONT-87 (Rp, Rp, Rp, Rp, Rp, Sp, Sp, Rp, Sp, Sp, Rp, Sp, Sp, Rp, Rp, Rp, Rp, | 106 | (Panel E) |
| Rp,Rp)-Gs5mCs5mCsTs5mCsAs GsTs5mCsTsGs5mCsTsTs5mCsGs5mCsAs | | |
| 5mCs5mC (5R-(SSR)₃-5R) | | |
| ONT-88 (Sp, Sp, Sp, Sp, Sp, Rp, Rp, Sp, Rp, Rp, Sp, Rp, Rp, Sp, Sp, Sp, Sp, Sp, | 106 | (Panel F) |
| Sp)-Gs5mCs5mCsTs5mCsAs GsTs5mCsTsGs5mCsTsTs5mCsGs5mCsAs | | |
| 5mCs5mC (5S-(RRS)₃-5S) | | |
| ONT-89 (Sp, Rp, Sp, Rp, Sp, Rp, Sp, Rp, Sp, Rp, Sp, Rp, Sp, Rp, Sp, Rp, Sp, | 106 | (Panel G) |
| Rp,Sp)-Gs5mCs5mCsTs5mCsAs GsTs5mCsTsGs5mCsTsTs5mCsGs5mCsAs | | |
| 5mCs5mC ((SR)₉S) | | |
| ONT-82 (All (Rp))- | 120 | (Panel H) |
| GsTs5mCs5mCs5mCsTsGsAsAsGsAsTsGsTs5mCsAsAsTsGs5mC | | |
| ONT-84 (All (Sp))- | 120 | (Panel I) |
| GsTs5mCs5mCs5mCsTsGsAsAsGsAsTsGsTs5mCsAsAsTsGs5mC | | |
| ONT-85 (Rp, Rp, Rp, Rp, Rp, Sp, Sp, Sp, Sp, Sp, Sp, Sp, Sp, Sp, Sp, Rp, Rp, | 120 | (Panel J) |
| Rp,Rp)-GsTs5mCs5mCs5mCsTsGsAsAsGsAsTsGsTs5mCsAsAsTsGs5mC | | |
| (5R-10S-4R) | | |
| ONT-86 (Sp, Sp, Sp, Sp, Sp, Rp, Rp, Rp, Rp, Rp, Rp, Rp, Rp, Rp, Rp, Sp, Sp, | 120 | (Panel K) |
| Sp,Sp)-GsTs5mCs5mCs5mCsTsGsAsAsGsAsTsGsTs5mCsAsAsTsGs5mC (5S- | | |
| 10R-4S) | | |

### Example 53: General IEX-HPLC Method for the Analysis of Crude DMT on and Purified DMT Off Oligonucleotides

[1847] The present Example describes IEX-HPLC analysis of crude and purified oligonucleotide compositions prepared by chirally controlled synthesis as described herein.

### Buffer A: 10 mM TrisHCl, 50% ACN, pH 8.0

### Buffer B: 10 mM TrisHCl, 800 mM NaClO₄, 50% ACN, pH 8.0

### Column: DIONEX, DNAPac, PA-100, Analytical, 4.0×250 mm, Part #063000

[1848] Column temperature=60° C.
Signal monitored at 254 and 280 nm

### Gradient Used:

| Time (min) | Flow (mL/min) | % A | % B | Curve |
|---|---|---|---|---|
| Initial | | 85 | 15 | |
| 3 | 1 | 85 | 15 | 1 |
| 23 | 1 | 60 | 40 | 6 |
| 25 | 1 | 5 | 95 | 6 |
| 25.5 | 1 | 85 | 15 | 6 |
| 30 | 1 | 85 | 15 | 1 |

### Example 54: General UPLC-LCMS Method for the Analysis of Purified DMT of Oligonucleotides

[1850] The present Example describes UPLC-LCMS analysis of purified oligonucleotide compositions prepared by chirally controlled synthesis as described herein.

### Buffer A: 15 mM TEA, 400 mM HFIP, Water

### Buffer B: 50:50 Buffer A/Methanol

### Column: UPLC@OST C₁₈ 1.7 μm, 2.1×500 mm

[1851] Column temperature=50° C.

### Gradient Used:

| Time (min) | Flow (mL/min) | % A | % B | Curve |
|---|---|---|---|---|
| Initial | 0.2 | 80 | 20 | |
| 2 | 0.2 | 80 | 20 | 1 |
| 22 | 0.2 | 30 | 70 | 6 |
| 25 | 0.2 | 5 | 95 | 6 |
| 25.5 | 0.2 | 80 | 20 | 6 |
| 30 | 0.2 | 80 | 20 | 1 |

### Example 55: General IEX-HPLC Method for the Purification of Crude DMT Off Oligonucleotide

[1853] The present Example describes IEX-HPLC purification of crude oligonucleotide compositions prepared by chirally controlled synthesis as described herein.

### Buffer A: 20 mM NaOH, pH 11.0

### Buffer B: 20 mM NaOH, 2.5 M NaCl, pH 11.0

[1854] Column: Empty column Waters AP-2 (Waters), custom in-house packed with Source 15Q support (GE Healthcare). Individual purification columns were packed and used for the different stereopure oligonucleotides.
Instrument: AKTA Purifier, equipped with the P-900 pump, the UPC-900 detector and the 50 mL injection SuperLoop (GE Healthcare)
Buffer heater temperature set=70° C.
Signal monitored at 254 nm
Fractions volume: 5 mL

### Gradient Used:

| Time (min) | Flow (mL/min) | % A | % B | Curve |
|---|---|---|---|---|
| Initial | | 100 | 0 | |
| 25 | 10 | 100 | 0 | 1 |
| 40 | 10 | 85 | 15 | 6 |
| 60 | 10 | 85 | 15 | 1 |
| 80 | 10 | 70 | 30 | 6 |
| 100 | 10 | 70 | 30 | 1 |
| 140 | 10 | 60 | 40 | 6 |
| 180 | 10 | 60 | 40 | 1 |
| 200 | 10 | 45 | 55 | 6 |
| 210 | 10 | 45 | 55 | 1 |
| 211 | 10 | 100 | 0 | 6 |
| 235 | 10 | 100 | 0 | 1 |

[1856] Collected fractions were individually analyzed by analytical IEX-HPLC using the analytical conditions and gradient described above. Pure fractions were pooled in order to provide purified material of 95% and above purity as determined by the 254 nm UV absorbance profiles.

| | SEQ | |
|---|---|---|
| | ID | FIG. |
| RP-HPLC of Purified DMT Off | NO: | 36: |
| ONT-75 (All (Rp))-Gs5mCs5mCsTs5mCsAs | 106 | (Panel A) |
| GsTs5mCsTsGs5mCsTsTs5mCsGs5mCsAs 5mCs5mC | | |
| ONT-80 (All (Sp))-Gs5mCs5mCsTs5mCsAs | 106 | (Panel B) |
| GsTs5mCsTsGs5mCsTsTs5mCsGs5mCsAs 5mCs5mC | | |
| ONT-77 (Rp, Rp, Rp, Rp, Rp, Sp, Sp, Sp, Sp, Sp, Sp, Sp, Sp, Sp, Sp, Rp, Rp, Rp, | 106 | (Panel C) |
| Rp)-Gs5mCs5mCsTs5mCsAs GsTs5mCsTsGs5mCsTsTs5mCsGs5mCsAs | | |
| 5mCs5mC (5R-10S-4R) | | |
| ONT-81 (Sp, Sp, Sp, Sp, Sp, Rp, Rp, Rp, Rp, Rp, Rp, Rp, Rp, Rp, Rp, Sp, Sp, Sp, | 106 | (Panel D) |
| Sp)-Gs5mCs5mCsTs5mCsAs GsTs5mCsTsGs5mCsTsTs5mCsGs5mCsAs | | |
| 5mCs5mC (5S-10R-4S) | | |
| ONT-87 (Rp, Rp, Rp, Rp, Rp, Sp, Sp, Rp, Sp, Sp, Rp, Sp, Sp, Rp, Rp, Rp, Rp, Rp, | 106 | (Panel E) |
| Rp)-Gs5mCs5mCsTs5mCsAs GsTs5mCsTsGs5mCsTsTs5mCsGs5mCsAs | | |
| 5mCs5mC (5R-(SSR)₃-5R) | | |
| ONT-88 (Sp, Sp, Sp, Sp, Sp, Rp, Rp, Sp, Rp, Rp, Sp, Rp, Rp, Sp, Sp, Sp, Sp, Sp, | 106 | (Panel F) |
| Sp)-Gs5mCs5mCsTs5mCsAs GsTs5mCsTsGs5mCsTsTs5mCsGs5mCsAs | | |
| 5mCs5mC (5S-(RRS)₃-5S) | | |
| ONT-89 (Sp, Rp, Sp, Rp, Sp, Rp, Sp, Rp, Sp, Rp, Sp, Rp, Sp, Rp, Sp, Rp, Sp, Rp, | 106 | (Panel G) |
| Sp)-Gs5mCs5mCsTs5mCsAs GsTs5mCsTsGs5mCsTsTs5mCsGs5mCsAs | | |
| 5mCs5mC ((SR)₉S) | | |
| ONT-82 (All (Rp))- | 120 | (Panel H) |
| GsTs5mCs5mCs5mCsTsGsAsAsGsAsTsGsTs5mCsAsAsTsGs5mC | | |
| ONT-84 (All (Sp))- | 120 | (Panel I) |
| GsTs5mCs5mCs5mCsTsGsAsAsGsAsTsGsTs5mCsAsAsTsGs5mC | | |
| ONT-85 (Rp, Rp, Rp, Rp, Rp, Sp, Sp, Sp, Sp, Sp, Sp, Sp, Sp, Sp, Sp, Rp, Rp, Rp, | 120 | (Panel J) |
| Rp)-GsTs5mCs5mCs5mCsTsGsAsAsGsAsTsGsTs5mCsAsAsTsGs5mC (5R- | | |
| 10S-4R) | | |
| ONT-86 (Sp, Sp, Sp, Sp, Sp, Rp, Rp, Rp, Rp, Rp, Rp, Rp, Rp, Rp, Rp, Sp, Sp, Sp, | 120 | (Panel K) |
| Sp)-GsTs5mCs5mCs5mCsTsGsAsAsGsAsTsGsTs5mCsAsAsTsGs5mC (5S- | | |
| 10R-4S) | | |

[1857] Table E-21. Compilation of the physico-chemical properties for the stereopure phosphorothioate oligonucleotides synthesized as described in Example XX.

[1858] Sequence A: human ApoB sequence 5′-Gs5mCs5mCsTs5mCsAsGsTs5mCsTsGs5mCsTsTs5mCsGs5mCsAs5mCs5mC-3′ (SEQ ID NO: 106).

[1859] Sequence B: mouse ApoB sequence 5′-GsTs5mCs5mCs5mCsTsGsAsAsGsAsTsGsTs5mCsAs AsTsGs5mC-3′ (SEQ ID NO: 120).

[1860] Underlined nucleotides designate 2′-O-MOE. s=phosphorothioate linkage. 5mC=5-methyl-2′-deoxycytidine. 5mC=5-methyl-2′-O-MOE-cytidine. Stereo architecture describes the stereoisomer nature (Rp/Sp) of each phosphorus atom in a given phosphorothioate linkage of the oligonucleotide. Retention time (t_{R}) in IEX-HPLC and Found molecular weight (MW) values were obtained using the corresponding analytical methods for the purified compounds (described above).

| | | | t_{R} IEX- | | |
|---|---|---|---|---|---|
| sequence | | | HPLC | Calc | Found |
| ID | sequence | stereo architecture | (min) | MW | MW |
| ONT-41 | A | Stereorandom | 17.34 | 7177.2 | 7175.7 |
| | | diastereomixture | | | |
| ONT-75 | A | All Rp | 16.44 | 7177.2 | 7177.0 |
| ONT-77 | A | 5R-10S-4R | 17.44 | 7177.2 | 7177.5 |
| ONT-80 | A | All Sp | 18.13 | 7177.2 | 7175.5 |
| ONT-81 | A | 5S-10R-4S | 17.67 | 7177.2 | 7175.8 |
| ONT-87 | A | 5R-(SSR)₃-5R | 13.64 | 7177.2 | — |
| ONT-88 | A | 5S-(RRS)₃-5S | 14.88 | 7177.2 | 7177.0 |
| ONT-89 | A | (SR)₉S | 14.25 | 7177.2 | — |
| ONT-83 | B | Stereorandom | 17.02 | 7233.2 | 7231.8 |
| | | diastereomixture | | | |
| ONT-82 | B | All Rp | 16.43 | 7233.2 | 7231.6 |
| ONT-84 | B | All Sp | 19.51 | 7233.2 | 7232.1 |
| ONT-85 | B | 5R-10S-4R | 18.76 | 7233.2 | 7231.1 |
| ONT-86 | B | 5S-10R-4S | 18.75 | 7233.2 | 7230.9 |

### Example 56: General RP-HPLC Method for the Overlay Analyses of Purified DMT Off Oligonucleotides

[1861] The present Example describes RP-HPLC analysis of purified oligonucleotide compositions prepared by chirally controlled synthesis as described herein.

### Buffer A: 50 mM TEAA, pH 7.0

### Buffer B: ACN

[1862] Column: XBridge C₁₈, 3.5 μm, C₁₈, 4.6×50 mm
Column temperature=50° C.
Signal monitored at 254 and 280 nm

### Gradient Used:

| Time(min) | Flow (mL/min) | % A | % B | Curve |
|---|---|---|---|---|
| Initial | | 95 | 5 | |
| 2 | 1 | 95 | 5 | 1 |
| 52 | 1 | 70 | 30 | 6 |
| 54 | 1 | 5 | 95 | 6 |
| 54.5 | 1 | 5 | 95 | 1 |
| 55 | 1 | 99 | 1 | 6 |
| 60 | 1 | 99 | 1 | 1 |

[1864] Panel A of FIG. 37 is an overlay of RP-HPLC traces of Purified DMT Off Oligonucleotide ONT-75, ONT-77, ONT-80, ONT-81, ONT-87, ONT-88, ONT-89 and ONT-41 (diastereomixture)-Gs5mCs5mCsTs5mCsAsGsTs5mCsTsGs5mCsTsTs5mCsGs5mCsAs5 mCs5mC (SEQ ID NO: 106).

[1865] Panel B of FIG. 37 shows an expanded view of Panel A, with each curve labeled as follows:

| Curve # | Oligonucleotide |
|---|---|
| 1 | diastereomixture (ONT-41) |
| 2 | all-Rp (ONT-75) |
| 3 | 5R-(SSR)₃-5R (ONT-87) |
| 4 | (SR)₉-S (ONT-89) |
| 5 | 5R-10S-4R (ONT-77) |
| 6 | 5S-10R-4S (ONT-81) |
| 7 | 5S-(RRS)₃-5S (ONT-88) |
| 8 | all-Sp (ONT-80) |

[1866] Panel A of FIG. 38 is an overlay of RP-HPLC of Purified DMT Off Oligonucleotide ONT-82, ONT-84, ONT-85, ONT-86, and ONT-83 (diastereomixture)-GsTs5mCs5mCs5mCsTsGsAsAsGsAsTsGsTs5mCsAsAsTsGs5mC (SEQ ID NO: 120)

[1867] Panel B of FIG. 38 shows an expanded view of Panel A, with each curve labeled as follows:

| Curve # | Oligonucleotide |
|---|---|
| 1 | diastereomixture (ONT-83) |
| 2 | all-Rp (ONT-82) |
| 3 | 5S-10R-4S (ONT-86) |
| 4 | 5R-10S-4R (ONT-85) |
| 5 | all-Sp (ONT-84) |

### Example 57: Thermal Denaturation Experiment (Tm)

[1868] The present Example describes characterization of chirally controlled oligonucleotide compositions using thermal denaturation.

[1869] Each DNA strand was mixed with its complementary RNA strand in equimolar concentration of 1 μM in 1×PBS. Total 3 mL solution was prepared for each duplex and the mixture was heated at 90° C. for 2 min and was allowed to cool down over the course of several hours. The mixtures were then stored at 4° C. for 2 hrs. Absorbance at 254 nm was recorded at an interval of 0.5 min starting the temperature gradient from 15.0° C. to 95.0° C. with rise of 0.5° C./minute, using Cary100 Series (Agilent Technologies). The 254 nm absorbance was plotted against the temperature and the Tm values were calculated from the respective first derivative of each curve.

[1870] FIG. 39 presents a Tm overlay of chirally controlled oligonucleotides and stereorandom oligonucleotide.

[1871] FIG. 39 illustrates the difference in Tm between four stereopure diastereoisomer phosphorothioate oligonucleotides (all-Rp 20-mer, all-Sp 20-mer, 5R-10S-4R and 5S-10R-4S gapmers) and the stereorandom phosphorothioate oligonucleotide. Full Rp phosphorothioate DNA demonstrates the highest affinity towards complementary RNA (Tm=85.1° C.) when compared to full Sp 20-mer (Tm=75.1° C.) which has the lowest affinity. 5R-10S-4R and 5S-10R-4S gapmers and the stereorandom phosphorothioate oligonucleotides all showed intermediates values (Tm range=80.1-81.2° C.).

[1872] Table E-22, below, gives Tm values for the studied stereopure and stereorandom phosphorothioate oligonucleotides having the human ApoB sequence 5′-Gs5mCs5mCsTs5mCsAsGsTs5mCsTsGs5mCsTsTs5mCsGs5mCsAs5mCs5mC-3′ (SEQ ID NO: 106) with various stereochemistry architectures on the phosphorothioate backbone.

TABLE E-22

| sequence ID | stereo architecture | Tm (° C.) |
|---|---|---|
| ONT-41 | Stereorandom | 81.0 |
| | diastereomixture | |
| ONT-75 | All Rp | 85.1 |
| ONT-77 | 5R-10S-4R | 80.1 |
| ONT-80 | All Sp | 75.1 |
| ONT-81 | 5S-10R-4S | 81.2 |

### Example 58: Preparation of Exemplary Chirally Controlled siRNA Oligonucleotides Targeting PCSK9

[1873] Proprotein convertase subtilisin/kexin type 9 (PCSK9), is an enzyme involved in cholesterol metabolism. PCSK9 binds to the receptor for low density lipoprotein (LDL), triggering its destruction. Although LDL associated with the receptor is also eliminated when the receptor is destroyed, the net effect of PCSK9 binding in fact increases LDL levels, as the receptor would otherwise cycle back to the cell surface and remove more cholesterol.

[1874] Several companies are developing therapeutic agents that target PCSK9. Of particular relevance to the present disclosure, each of Isis Pharmaceuticals, Santaris Pharma, and Alnylam Pharmaceuticals is developing a nucleic acid agent that inhibits PCSK9. The Isis Pharmaceuticals product, an antisense oligonucleotide, has been shown to increase expression of the LDLR and decrease circulating total cholesterol levels in mice (Graham et al “Antisense inhibition of proprotein convertase subtilisin/kexin type 9 reduces serum LDL in hyperlipidemic mice”. J. Lipid Res. 48 (4): 763-7, April 2007). Initial clinical trials with the Alnylam Pharmaceuticals product, ALN-PCS, reveal that RNA interference offers an effective mechanism for inhibiting PCSK9 (Frank-Kamenetsky et al “Therapeutic RNAi targeting PCSK9 acutely lowers plasma cholesterol in rodents and LDL cholesterol in nonhuman primates”. Proc. Natl. Acad. Sci. U.S.A. 105 (33): 11915-20, August 2008).

[1875] The present Example describes preparation of a variety of chirally controlled or stereorandom siRNA agents directed to PCSK9. Specifically, this Example describes preparation of each of the following oligonucleotide compositions as illustrated in Table E-23 below:

TABLE E-23

| | SEQ | | |
|---|---|---|---|
| | ID | | |
| ONT # | NO: | Sequence | Type |
| ONT-106 | 121 | (Rp)-uucuAGAccuGu | PCSK9 |
| | | uuuGcuudTsdT | sense |
| ONT-107 | 121 | (Sp)-uucuAGAccuGu | PCSK9 |
| | | uuuGcuudTsdT | sense |
| ONT-108 | 122 | (Rp)-AAGcAAAAcAGG | PCSK9 |
| | | UCuAGAAdTsdt | antisense |
| ONT-109 | 122 | (Sp)-AAGcAAAAcAGG | PCSK9 |
| | | UCuAGAAdTsdT | antisense |
| ONT-110 | 122 | (Rp, Rp)-asAGcAAA | PCSK9 |
| | | AcAGGUCuAGAAdTsdT | antisense |
| ONT-111 | 123 | (Sp, Rp)-asGcAAAA | PCSK9 |
| | | cAGGUCuAGAAdTsdT | antisense |
| ONT-112 | 123 | (Sp, Sp)-asGcAAAA | PCSK9 |
| | | cAGGUCuAGAAdTsdT | antisense |
| ONT-113 | 123 | (Rp, Sp)-asGcAAAA | PCSK9 |
| | | cAGGUCuAGAAdTsdT | antisense |

NOTE:
lower case letters represent 2′OMe RNA residues; capital letters represent 2′OH RNA residues; and bolded and italicized “s” indicates a phosphorothioate moiety.

[1876] Lcaa-CPG-500 used in the preparation of these oligonucleotides was prepared according to the following reaction:

[chemical structure]

[1877] In particular, 5′-O-DMTr-2′-deoxythymidine (1) (4.28 g, 7.86 mmol) was dissolved in anhydrous DCM (50 mL) and mixed with 2 equiv of succinic anhydride (1.57 g, 15.7 mmol) and 3 equiv of 4-N,N-dimethylaminopyridine (2.88 g, 23.6 mmol). The reaction was stirred under Argon at room temperature. After complete consumption of the starting material as determined by TLC (1 hour), the solvents were evaporated to dryness, the crude residue was dissolved in DCM containing 1% triethylamine then purified by flash silica gel chromatography using a gradient of 0-2% of MeOH in DCM containing 2% triethylamine. Yield of pure compound (2) after evaporation was 5.5 g, 94%. The resulting 5′-O-DMTr-2′-deoxythymidine-3′-O-succinate (2) (0.60 g, 0.81 mmol), N,N-diisopropylethylamine (0.71 mL, 4.02 mmol) and CPG-500 (10 g) were taken up in DMF (50 mL) then HBTU (0.37 g, 0.97 mmol) was added. The mixture was shaken for 2 h then filtered. The support was washed with DMF, MeOH and finally, DCM then dried in vacuo. Trityl cation analysis (monitoring at 504 nm) showed that the loading of nucleoside on the support (3) was 38 μmol/g.

[1878] Each oligonucleotide, containing 2′-OH and 2′-OMe phosphodiester and stereodefined 2′-deoxy and 2′-OMe phosphorothioate diester internucleotidic linkages as indicated above in Table E-23, was synthesized on an ABI 394 DNA/RNA synthesizer according to the cycles summarized in Table E-24 and Table E-25 respectively, using a 10 μmol capacity synthesis column loaded with 130 mg (4.9 μmol) of succinyl linked 5′-O-DMTr-2′-deoxythymidine (38 μmol/g). Prior to synthesis, a preliminary capping step (capping 2) was performed and the synthesis was terminated with removal of the terminal 5′-O-DMTr groups. The oxidation step was performed using a commercially available 5-6 M solution of tert-butyl hydroperoxide (TBHP) in decane which was then diluted with four parts dichloromethane. The stereospecific sulfurization step was performed using the 0.3 M S-cyanoethylmethylthiosulfonate reagent following the coupling of the corresponding chiral phosphoramide and the two-step capping process (Table E-25).

[1879] Once the automated oligonucleotide synthesis cycle was completed and the final 5′-O-DMTr group was removed, the synthesis column was taken off the DNA/RNA synthesizer and dried under vacuum. 10 mL solution of 0.5 M 1,5-diazabicyclo[4.3.0]non-5-ene (DBN), 0.25 M N,O-bis(trimethylsilyl)trifluoroacetamide (BSTFA) in ACN was continuously added to the support through the synthesis column for 1 min without stopping the flow using a syringe attached to one end of the synthesis column. The support was then washed with anhydrous ACN and dried under vacuum. Then, the dried support was transferred into an empty screw-cap plastic vial and treated with 40% MeNH₂ aqueous solution (0.5 mL) at 60° C. for 10 min. After that, the vial was immediately cooled down and after dilution with DMSO (0.5 mL), the support was removed by filtration, washed again with DMSO (1 mL) and filtered. The filtrate was cooled down and then immediately treated with 3HF·Et₃N (0.75 mL) at 60° C. for 10 min, then immediately frozen and stored at 4° C. prior to purification.

TABLE E-24
Summary for Oligonucleotide Synthesis on a DNA/RNA Synthesizer
ABI 394 (2′-O-TBDMS and 2′-OMe substituted RNA cycle)

| step | reaction | reagent | delivery time (sec) | wait time (sec) |
|---|---|---|---|---|
| 1 | detritylation | 3% TCA in DCM | 3 + 120 + 10 | N. A. |
| 2 | coupling | 0.15M | 7 + 6 | 30 + 600 |
| | | phosphoramidite in | | |
| | | ACN + 2M CMPT in | | |
| | | ACN | | |
| 3 | capping | 5% Pac₂O in THF/2,6- | 10 | 20 |
| | | lutidine + 16% NMI in | | |
| | | THF | | |
| 4 | oxidation | 1.1M tert-butyl | 20 | 110 |
| | | hydroperoxide in 4:1 | | |
| | | dichloromethane:decane | | |

TABLE E-25
Summary for Oligonucleotide Synthesis on a DNA/RNA Synthesizer ABI 394
(stereodefined phosphorothioate 2′-deoxy and 2′-OMe RNA cycle)

| step | reaction | reagent | delivery time (sec) | wait time (sec) |
|---|---|---|---|---|
| 1 | detritylation | 3% TCA in DCM | 3 + 120 + 10 | N.A. |
| 2 | coupling | 0.15M chiral | 8 + 6 | 30 + 900 (2′-OMe |
| | | phosphoramidite in | | RNA) |
| | | ACN + 2M CMPT in | | 30 + 600 (DNA) |
| | | ACN | | |
| 3 | capping 1 | 5% Pac₂O in THF/2,6- | 30 | 60 |
| | | lutidine | | |
| 4 | capping 2 | 5% Pac₂O in THF/2,6- | 30 | 60 |
| | | lutidine + 16% NMI in | | |
| | | THF | | |
| 5 | sulfurization | 0.3M S-(2-cyanoethyl) | 15 + 3 × 4 | 120 + 3 × 60 + 300 |
| | | methylthiosulfonate | | |
| | | [chemical structure] in ACN/BSTFA | | |

### Example 59. General IEX-HPLC Method for the Analysis of Crude and Purified DMT Off RNA Oligonucleotides

[1880] Buffer A: 20 mM sodium phosphate, pH 11.0
Buffer B: 20 mM sodium phosphate, 1 M NaBr, pH 11.0

### Column: DIONEX, DNAPac, PA-100, Analytical, 4.0×250 mm

[1881] Column temperature=60° C.
Signal monitored at 254 and 280 nm

### Gradient Used:

| Time (min) | Flow (mL/min) | % A | % B | Curve |
|---|---|---|---|---|
| Initial | | 95 | 5 | |
| 3 | 1 | 95 | 5 | 1 |
| 23 | 1 | 20 | 80 | 6 |
| 25 | 1 | 5 | 95 | 6 |
| 25.5 | 1 | 95 | 5 | 6 |
| 30 | 1 | 95 | 5 | 1 |

### Example 60. General UPLC-LCMS Method for the Analysis of Purified DMT Off RNA Oligonucleotides

### Buffer A: 15 mM TEA, 400 mM HFIP, Water

### Buffer B: 50:50 Buffer A/Methanol

### Column: UPLC@OST C₁₈ 1.7 μm, 2.1×500 mm

[1883] Column temperature=50° C.

### Gradient Used:

| Time (min) | Flow (mL/min) | % A | % B | Curve |
|---|---|---|---|---|
| Initial | 0.2 | 95 | 5 | |
| 10 | 0.2 | 35 | 65 | 6 |
| 12 | 0.2 | 5 | 95 | 6 |
| 12.5 | 0.2 | 95 | 5 | 6 |
| 15 | 0.2 | 95 | 5 | 1 |

### Example 61. General IEX-HPLC Method for the Purification of Crude DMTr Off RNA Oligonucleotides

[1885] Buffer A: 20 mM sodium phosphate, pH 8.5
Buffer B: 20 mM sodium phosphate, 1 M NaBr, pH 8.5
Column: Empty column Waters AP-2 (Waters), custom in-house packed with Source 15Q support (GE Healthcare). The same purification column was used for the different stereopure oligonucleotides.
Instrument: Waters HPLC unit equipped with the 2525 binary gradient module, the 2487 dual absorbance detector and the 20 mL Flex injector (Waters).
Buffer heater temperature set=70° C.
Signal monitored at 254 nm and 280 nm
Fractions volume: 4.5 mL

### Gradient Used:

| Time (min) | Flow (mL/min) | % A | % B | Curve |
|---|---|---|---|---|
| Initial | | 100 | 0 | |
| 10 | 10 | 100 | 0 | 1 |
| 25 | 10 | 80 | 20 | 6 |
| 85 | 10 | 67.5 | 32.5 | 6 |
| 95 | 10 | 67.5 | 32.5 | 1 |
| 155 | 10 | 55 | 45 | 6 |
| 165 | 10 | 0 | 100 | 6 |
| 170 | 10 | 100 | 0 | 6 |
| 180 | 10 | 100 | 0 | 1 |

[1887] Collected fractions were individually analyzed by analytical IEX-HPLC using the analytical conditions and gradient described above. Pure fractions were pooled in order to provide purified material of 95% and above purity as determined by the 254 nm UV absorbance profiles.

### Example 62. General RP-Sep-Pak Method for the Desalting of Purified RNA Oligonucleotides

[1888] The solution of pooled pure fractions was loaded on a Sep-Pak cartridge (Waters, Sep-Pak Vac 35 cc (10 g) Cis Cartridges) pre-conditioned with water. After loading of the sample (100 mL), the cartridge was washed with milli Q water (50 mL) to remove all salt and then washed with 50% ACN/water to elute the full length desalted RNA oligonucleotide. The collected solution was concentrated in vacuo to a volume of 5 mL and lyophilized from water.

### Example 63: Preparation of Double Stranded siRNA Agents Using Chirally Controlled Oligonucleotide Strands

[1889] The present Example describes preparation of double stranded siRNA agents by thermal annealing of chirally controlled oligonucleotide strands as described above.

[1890] Each RNA strand was mixed with its complementary RNA strand in equimolar concentration of 10 μM in 1×PBS. Total 0.5 ml, solution was prepared for each duplex and the mixture was heated at 90° C. for 2 min and was allowed to cool down over the course of several hours. The mixtures were then stored at 4° C. Physico-chemical properties of the utilized RNA strands are presented below in Table E-26.

TABLE E-26

| duplex | | sequence | stereo | Calc | Found |
|---|---|---|---|---|---|
| ID | sequence | ID | architecture | MW | MW |
| ONT D-1 | S | ONT-116 | Stereorandom | 6735.4 | 6734.9 |
| | | | diastereomixture | | |
| | AS1 | ONT-114 | Stereorandom | 6805.4 | 6805.2 |
| | | | diastereomixture | | |
| ONT D-2 | S | ONT-107 | Sp | 6735.4 | 6736.6 |
| | AS1 | ONT-109 | Sp | 6805.4 | 6801.6 |
| ONT D-3 | S | ONT-106 | Rp | 6735.4 | 6731.8 |
| | AS1 | ONT-109 | Sp | 6805.4 | 6801.6 |
| ONT D-4 | S | ONT-107 | Sp | 6735.4 | 6736.6 |
| | AS1 | ONT-108 | Rp | 6805.4 | 6799.2 |
| ONT D-5 | S | ONT-106 | Rp | 6735.4 | 6731.8 |
| | AS1 | ONT-108 | Rp | 6805.4 | 6799.2 |
| ONT D-7 | S | ONT-116 | Stereorandom | 6735.4 | 6734.9 |
| | | | diastereomixture | | |
| | AS2 | ONT-115 | Stereorandom | 6835.5 | 6835.2 |
| | | | diastereomixture | | |
| ONT D-8 | S | ONT-106 | Rp | 6735.4 | 6731.8 |
| | AS2 | ONT-110 | Rp, Rp | 6835.5 | 6832.3 |
| ONT D-9 | S | ONT-107 | Sp | 6735.4 | 6736.6 |
| | AS2 | ONT-110 | Rp, Rp | 6835.5 | 6832.2 |
| ONT D-10 | S | ONT-106 | Rp | 6735.4 | 6731.8 |
| | AS2 | ONT-111 | Sp, Rp | 6835.5 | 6832.4 |
| ONT D-11 | S | ONT-107 | Sp | 6735.4 | 6736.6 |
| | AS2 | ONT-111 | Sp, Rp | 6835.5 | 6832.4 |
| ONT D-12 | S | ONT-106 | Rp | 6735.4 | 6731.8 |
| | AS2 | ONT-112 | Sp, Sp | 6835.5 | 6836.2 |
| ONT D-13 | S | ONT-107 | Sp | 6735.4 | 6736.6 |
| | AS2 | ONT-112 | Sp, Sp | 6835.5 | 6836.2 |
| ONT D-14 | S | ONT-106 | Rp | 6735.4 | 6731.8 |
| | AS2 | ONT-113 | Rp, Sp | 6835.5 | 6834.6 |
| ONT D-15 | S | ONT-107 | Sp | 6735.4 | 6736.6 |
| | AS2 | ONT-113 | Rp, Sp | 6835.5 | 6834.6 |

[1891] Oligonucleotide sequences used, human PCSK9 siRNA: Sense strand (S) 5′-uucuAGAccuGuuuuGcuudTsdT-3′ (SEQ ID NO: 121); Antisense strand 1 (AS 1) 5′-AAGcAAAAcAGGUCuAGAAdTsdT-3′ (SEQ ID NO: 122); Antisense strand 2 (AS2) 5′-asAGcAAAAcAGGUCuAGAAdTsdT-3′ (SEQ ID NO: 123). Upper case nucleotides: RNA, lowercase nucleotides 2′-OMe, d=2′-deoxy, s=phosphorothioate. Stereo architecture describes the stereoisomer nature (Rp/Sp absolute configuration) of each phosphorus atom in a given phosphorothioate linkage of the oligonucleotide. Found molecular weight (MW) values were obtained using the corresponding analytical methods for the purified compounds (described above).

[1892] FIG. 51 shows overlays of IEX-HPLC profiles showing difference in retention times between stereopure RNA oligonucleotides.

| Curve # | Oligonucleotide |
|---|---|
| 1 | ONT-109 (Sp) |
| 2 | ONT-114 (diastereomixture) |
| 3 | ONT-108 (Rp) |

[1893] FIG. 52 shows overlays of IEX-HPLC profiles showing difference in retention times between stereopure RNA oligonucleotides.

| Curve # | Oligonucleotide |
|---|---|
| 1 | ONT-109 (Rp) |
| 2 | ONT-114 (diastereomixture) |
| 3 | ONT-107 (Sp) |

[1894] In addition to the above specifically exemplified, prepared chirally controlled siRNA oligonucleotides, the present invention provides for preparation of siRNA duplexes having several chiral phosphorothioate internucleotide linkages, and full chiral phosphorothioate internucleotide linkages.

[1895] For example, in accordance with the present invention, multiple chiral phosphorothioate linkages are introduced inside a RNA oligonucleotide by using the appropriate chiral RNA 3′-phosphoramidites, having suitable 2′-OH protecting groups, such as 2′-O-PivOM (Debart et al., Chem. Eur. J., 2008, 14, 9135), 2′-O-CEM (Ohgi et al., Org. Lett., 2005, 7, 7913; Wada et al., J. Org. Chem., 2012, 77, 7913), 2′-O-TOM (Pitsch et al., Helv. Chim. Acta, 2001, 84, 3773) or 2′-O-TC (Dellinger et al., J. Am. Chem. Soc., 2011, 133, 11540). Each of the following Human PCSK9 siRNA Sense Strands having several chiral phosphorothioate internucleotide linkages and full chiral phosphorothioate internucleotide linkages can be prepared in accordance with the present invention:

| | SEQ ID | |
|---|---|---|
| | NO: | PCSK9 siRNA Sense Strands |
| PCSK9 | 121 | (All (Sp))- |
| (1) | | ususcsusAsGsAscscsusGsususususGscsususdTsdT |
| PCSK9 | 121 | (All (Rp))- |
| (2) | | ususcsusAsGsAscscsusGsususususGscsususdTsdT |
| PCSK9 | 121 | (All (Sp))-usucuAsGsAsccuGsuuuuGscuusdTsdT |
| (3) | | |
| PCSK9 | 121 | (All (Rp))-usucuAsGsAsccuGsuuuuGscuusdTsdT |
| (4) | | |
| PCSK9 | 121 | (Rp, Sp, Rp, Sp, Rp, Sp, Rp, Sp, Rp, Sp, Rp, Sp, |
| (5) | | Rp, Sp, Rp, Sp, Rp, Sp, Rp, Sp)- |
| | | ususcsusAsGsAscscsusGsususususGscsususdTsdT |
| PCSK9 | 121 | (Sp, Rp, Sp, Rp, Sp, Rp, Sp, Rp, Sp, Rp, Sp, Rp, |
| (6) | | Sp, Rp, Sp, Rp, Sp, Rp, Sp, Rp)- |
| | | ususcsusAsGsAscscsusGsususususGscsususdTsdT |

NOTE:
lower case letters represent 2′-OMe RNA residues; capital letters represent RNA residues; d = 2′-deoxy residues; and “s” indicates a phosphorothioate moiety.

[1896] Synthesis examples for Human PCSK9 siRNA Antisense Strands having several chiral phosphorothioate internucleotide linkages and full chiral phosphorothioate internucleotide linkages.

| | SEQ | |
|---|---|---|
| | ID | |
| | NO: | Human PCSK9 siRNA Antisense Strands |
| PCSK9 (7) | 122 | (All (Rp))- AsAsGscsAsAsAsAscsAsGsGsUsCsusAsGsAsAsdTsdT |
| PCSK9 (8) | 122 | (All (Sp))- AsAsGscsAsAsAsAscsAsGsGsUsCsusAsGsAsAsdTsdT |
| PCSK9 (9) | 122 | (All (Rp))- AsAGcAAAAcsAsGsGsUsCsusAsGsAsAsdTsdT |
| PCSK9 (10) | 122 | (All (Sp))- AsAGcAAAAcsAsGsGsUsCsusAsGsAsAsdTsdT |
| PCSK9 (11) | 122 | (All (Rp))- AAsGscsAsAsAsAscAGGUCuAGAAdTsdT |
| PCSK9 (12) | 122 | (All (Sp))- AAsGscsAsAsAsAscAGGUCuAGAAdTsdT |
| PCSK9 (13) | 122 | (All (Rp))- AsAsGscAsAsAsAscAsGsGsUsCsuAsGsAsAsdTsdT |
| PCSK9 (14) | 122 | (All (Sp))- AsAsGscAsAsAsAscAsGsGsUsCsuAsGsAsAsdTsdT |
| PCSK9 (15) | 122 | (All (Rp))- AsAGcAAAsAscAsGsGsUsCsusAsGsAsAsdTsdT |
| PCSK9 (16) | 122 | (All (Sp))- AsAGcAAAsAscAsGsGsUsCsusAsGsAsAsdTsdT |
| PCSK9 (17) | 122 | (Rp, Sp, Rp, Sp, Rp, Sp, Rp, Sp, Rp, Sp, Rp, Sp, Rp, Sp)- |
| | | AsAGcAAAsAscAsGsGsUsCsusAsGsAsAsdTsdT |
| PCSK9 (18) | 122 | (Sp, Rp, Sp, Rp, Sp, Rp, Sp, Rp, Sp, Rp, Sp, Rp, Sp, Rp)- |
| | | AsAGcAAAsAscAsGsGsUsCsusAsGsAsAsdTsdT |

NOTE:
lower case letters represent 2′-OMe RNA residues; capital letters represent RNA residues; d = 2′-deoxy residues; and “s” indicates a phosphorothioate moiety.

[1897] Alternatively or additionally, the present invention provides for preparation of siRNA duplexes having several chiral phosphorothioate internucleotide linkages and full chiral phosphorothioate internucleotide linkages and fully modified ribose moieties.

[1898] For example, in certain embodiments, multiple chiral phosphorothioate linkages are introduced inside a fully ribose-modified RNA oligonucleotide by using the appropriate chiral RNA 3′-phosphoramidites, having the corresponding desired ribose 2′-chemical modification, such as 2′-deoxy-2′-fluoro (2′-F) or 2′-O-methyl (2′-OMe). To give but a few examples, each of the following Human PCSK9 siRNA fully modified 2′-F/2′-OMe Sense Strands having several chiral phosphorothioate internucleotide linkages and full chiral phosphorothioate internucleotide linkages, can be prepared.

| | SEQ | |
|---|---|---|
| | ID | |
| | NO: | Human PCSK9 siRNA fully modified 2′-F/2′-OMe Sense Strands |
| PCSK9 (19) | 121 | (All (Rp))- UfsusCfsusAfsgsAfscsCfsusGfsusUfsusUfsgsCfsusUfsdTsdT |
| PCSK9 (20) | 121 | (All (Sp))- UfsusCfsusAfsgsAfscsCfsusGfsusUfsusUfsgsCfsusUfsdTsdT |
| PCSK9 (21) | 121 | (All (Rp))- UfsuCfsuAfsgAfscCfsuGfsuUfsuUfsgCfsuUfsdTsdT |
| PCSK9 (22) | 121 | (All (Sp))- UfsuCfsuAfsgAfscCfsuGfsuUfsuUfsgCfsuUfsdTsdT |
| PCSK9 (23) | 121 | (Rp, Sp, Rp, Sp, Rp, Sp, Rp, Sp, Rp, Sp, Rp, Sp, Rp, Sp, Rp, Sp, Rp, Sp, Rp, |
| | | Sp)- UfsusCfsusAfsgsAfscsCfsusGfsusUfsusUfsgsCfsusUfsdTsdT |
| PCSK9 (24) | 121 | (Sp, Rp, Sp, Rp, Sp, Rp, Sp, Rp, Sp, Rp, Sp, Rp, Sp, Rp, Sp, Rp, Sp, Rp, Sp, |
| | | Rp)- UfsusCfsusAfsgsAfscsCfsusGfsusUfsusUfsgsCfsusUfsdTsdT |

NOTE:
lower case letters represent 2′-OMe RNA residues; capital letters represent 2′-F RNA residues; d = 2′-deoxy residues; and “s” indicates a phosphorothioate moiety.

[1899] Synthesis examples for Human PCSK9 siRNA fully modified 2′-F/2′-OMe Antisense Strands having several chiral phosphorothioate internucleotide linkages and full chiral phosphorothioate internucleotide linkages.

| | SEQ | |
|---|---|---|
| | ID | |
| | NO: | Human PCSK9 siRNA fully modified 2′-F/2′-OMe Antisense Strands |
| PCSK9 (25) | 122 | (All (Rp))- asAfsgsCfsasAfsasAfscsAfsgsGfsusCfsusAfsgsAfsasdTsdT |
| PCSK9 (26) | 122 | (All (Sp))- asAfsgsCfsasAfsasAfscsAfsgsGfsusCfsusAfsgsAfsasdTsdT |
| PCSK9 (27) | 122 | (All (Rp))- asAfgCfaAfaAfcsAfsgsGfsusCfsusAfsgsAfsasdTsdT |
| PCSK9 (28) | 122 | (All (Sp))- asAfgCfaAfaAfcsAfsgsGfsusCfsusAfsgsAfsasdTsdT |
| PCSK9 (29) | 122 | (All (Rp))- asAfsgCfsaAfsaAfscAfsgGfsuCfsuAfsgAfsadTsdT |
| PCSK9 (30) | 122 | (All (Sp))- asAfsgCfsaAfsaAfscAfsgGfsuCfsuAfsgAfsadTsdT |
| PCSK9 (31) | 122 | (Rp, Sp, Rp, Sp, Rp, Sp, Rp, Sp, Rp, Sp, Rp, Sp, Rp, Sp)- |
| | | asAfgCfaAfasAfscAfsgsGfsusCfsusAfsgsAfsasdTsdT |
| PCSK9 (32) | 122 | (Sp, Rp, Sp, Rp, Sp, Rp, Sp, Rp, Sp, Rp, Sp, Rp, Sp, Rp)- |
| | | asAfgCfaAfasAfscAfsgsGfsusCfsusAfsgsAfsasdTsdT |

NOTE:
lower case letters represent 2′-OMe RNA residues; capital letters represent 2′-F RNA residues; d = 2′-deoxy residues; and “s” indicates a phosphorothioate moiety.

[1900] To assemble duplexes, RNA strand thermal annealing and preparation of siRNA duplexes is performed. Specifically, each RNA strand is mixed with its complementary RNA strand in equimolar concentration of 10 μM in 1×PBS. Total 0.5 mL solution is prepared for each duplex and the mixture is heated at 90° C. for 2 min and is allowed to cool down over the course of several hours. The mixtures are then stored at 4° C.

[1901] Following the thermal RNA strand annealing step, all the possible siRNA duplex combinations can be prepared by annealing any of the Sense strands with any possible complementary strand of the Antisense strands.

[1902] All prepared siRNA duplexes can be evaluated in vitro for their PCSK9 gene-silencing properties, following transfection in HeLa cells or Hep3B cells (e.g., as described herein). According to the present invention, different potenties may be observed for different duplexes, e.g., that vary in number, position, and/or stereo architecture of the chiral phosphorothioate backbone linkages, and optionally also in presence, level, and or type of one or more other chemical modifications.

[1903] Any or all siRNA properties such as: nuclease resistance, cell penetration, endosomal escape, duplex thermodynamic stability, tridimensional structure of the duplex, affinity towards the various mechanistic steps of enzyme interactions, affinity towards the target mRNA, specific off-target effects, immunostimulation, duration of action, pharmacokinetics, etc. may be modulated and influenced by the stereochemistry of the chiral phosphorothioate backbone linkages, as described herein.

### Example 64. Preparation of Chirally Controlled Preparations of Oligonucleotide

[chemical structure]

[1905] The present Example describes preparation of a variety of particular chirally controlled compositions of certain oligonucleotides described therein.

[1906] N⁴-Acetyl-5′-O-DMTr-2′-O-methylcytidine (1) (1.15 g, 1.91 mmol) was dissolved in anhydrous DCM (20 mL) and mixed with 2 equiv of succinic anhydride (0.383 g, 3.82 mmol) and 3 equiv of 4-N,N-dimethylaminopyridine (0.701 g, 5.73 mmol). The reaction was stirred under Argon at room temperature. After complete consumption of starting material as determined by TLC (1 hour), the solvents were evaporated to dryness, the crude residue was dissolved in DCM containing 1% triethylamine then purified by flash silica gel chromatography using a gradient of 0-2% of MeOH in DCM containing 2% of triethylamine. Yield of pure succinyl compound (2) after evaporation was 1.50 g, 98%. MS (ESI +ve): calc (M+H)⁺: 702.27, found: 702.34. The resulting N⁴-acetyl-5′-O-DMTr-3′-O-succinyl-2′-O-methylcytidine (2) (0.18 g, 0.22 mmol), N,N-diisopropylethylamine (0.18 mL, 0.79 mmol) and GE Custom Support™ Amino (1 g) were taken up in DMF (5 mL) then HBTU (0.10 g, 0.26 mmol) was added. The mixture was shaken for 2 h then filtered. The support was washed with DMF, MeOH and finally DCM then dried in vacuo. Trityl cation analysis (monitoring at 504 nm) showed that the loading of nucleoside on the support (3) was 180 μmol/g.

### Example 65. Preparation of Chirally Controlled Preparations of Oligonucleotide

[chemical structure]

[1908] Using a procedure analogous to that described in Example 64, N²-Phenoxyacetyl-5′-O-DMTr-3′-O-succinyl-2′-O-methylguanosine (4, MS (ESI +ve): calc (M+H)⁺: 834.30, found: 834.32) was loaded onto GE Custom Support™ Amino. Trityl cation analysis (monitoring at 504 nm) showed that the loading of nucleoside on the support (6) was 140 μmol/g.

[1909] In some embodiments, oligonucleotides containing stereodefined 2′-OMe phosphorothioate triester internucleotidic linkages was synthesized on ABI 394DNA/RNA synthesizer according to the cycle summarized in Table E-27 using a 10 μmol capacity synthesis column loaded with 60 mg (10.8 and 8.4 μmol respectively) of either uncapped succinyl linked 5′-O-DMTr-2′-O-methyl-G^{Pac} (6, 140 μmol/g) or 5′-O-DMTr-2′-O-methyl-C^{Ac} (3, 180 μmol/g). The synthesis cycle was performed with a preliminary capping step (capping 2) and with removal of the terminal 5′-O-DMTr group. The stereospecific sulfurization steps were performed using the 0.3 M S-(2-cyanoethyl)methylthiosulfonate reagent in ACN containing BSTFA, following the coupling of the corresponding chiral phosphoramide and the two-step capping process (Table E-27).

[1910] Once the automated oligonucleotide synthesis cycle was complete, and the final 5′-O-DMTr group removed, the synthesis column was taken off the DNA/RNA synthesizer and dried under vacuum. The dried support was transferred onto an empty glass manual peptide synthesizer and 10 mL solution of 0.5 M 1,5-diazabicyclo[4.3.0]non-5-ene (DBN), 0.25 M N,O-bis(trimethylsilyl)trifluoroacetamide (BSTFA) in ACN was continuously added to the support for 5 min without stopping the flow in the manual peptide synthesizer. The support was washed by ACN and dried in vacuo. Then, the support was treated with 5% EtOH/conc NH₃ (5 mL) at 60° C. for 6 h, and left at room temperature for 12 h. The support was removed by filtration and washed with conc. NH₃. The filtrate was concentrated in vacuo then purified by IEX.

TABLE E-27
Summary for Oligonucleotide Synthesis.

| step | reaction | reagent | delivery time (sec) | wait time (sec) |
|---|---|---|---|---|
| 1 | detritylation | 3% TCA in DCM | 3 + 120 + 10 | N.A. |
| 2 | coupling | 0.15M | 8 + 6 | 30 + 900 |
| | | phosphoramidite in | | |
| | | ACN + 2M CMPT in | | |
| | | ACN | | |
| 3 | capping 1 | 5% Pac₂O in THF/2,6- | 30 | 60 |
| | | lutidine | | |
| 4 | capping 2 | 5% Pac₂O in THF/2,6- | 30 | 60 |
| | | lutidine + 16% NMI in | | |
| | | THF | | |
| 5 | sulfurization | 0.3M (S-cyanoethyl)- | 15 + 3 × 4 | 120 + 3 × 60 + 300 |
| | | methylthiosulfonate | | |
| | | [chemical structure] in ACN/BSTFA | | |

[1911] Synthesis of Oligonucleotide ONT-94: (All (Sp))-gsgsusgsgsasasgsgsc (SEQ ID NO: 124). t_{R} (IEX-HPLC): 18.26 min. Calc MW: 3563.9; Found MW: 3562.6.

[1912] Synthesis of Oligonucleotide ONT-96: (All (Rp))-gsgsusgsgsasasgsgsc (SEQ ID NO: 124). t_{R} (IEX-HPLC): 18.16 min. Calc MW: 3563.9; Found MW: 3561.7.

[1913] Synthesis of Oligonucleotide ONT-98: (Rp, Sp, Rp, Sp, Rp, Sp, Rp, Sp, Rp)-gsgsusgsgsasasgsgsc (SEQ ID NO: 124). t_{R} (IEX-HPLC): 18.05 min. Calc MW: 3563.9; Found MW: 3562.5.

[1914] Synthesis of Oligonucleotide ONT-100: (Sp, Rp, Sp, Rp, Sp, Rp, Sp, Rp, Sp)-gsgsusgsgsasasgsgsc (SEQ ID NO: 124). t_{R} (IEX-HPLC): 17.86 min. Calc MW: 3563.9; Found MW: 3561.1.

[1915] Synthesis of Oligonucleotide ONT-102: (Rp, Rp, Sp, Sp, Sp, Sp, Sp, Rp, Rp)-gsgsusgsgsasasgsgsc (SEQ ID NO: 124). t_{R} (IEX-HPLC): 18.30 min. Calc MW: 3563.9; Found MW: 3561.3.

[1916] Synthesis of Oligonucleotide ONT-104: (Sp, Sp, Rp, Rp, Rp, Rp, Rp, Sp, Sp)-gsgsusgsgsasasgsgsc (SEQ ID NO: 124). t_{R} (IEX-HPLC): 17.95 min. Calc MW 3563.9; Found MW: 3562.7.

[1917] Synthesis of Oligonucleotide ONT-95: (All (Sp))-gscscsuscscsasg. t_{R} (IEX-HPLC): 14.78 min. Calc MW: 2709.2; Found MW: 2707.4.

[1918] Synthesis of Oligonucleotide ONT-97: (All (Rp))-gscscsuscscsasg. t_{R} (IEX-HPLC): 15.60 min. Calc MW: 2709.2; Found MW: 2708.3.

[1919] Synthesis of Oligonucleotide ONT-99: (Rp, Sp, Rp, Sp, Rp, Sp, Rp)-gscscsuscscsasg. t_{R} (IEX-HPLC): 16.10 min. Calc MW: 2709.2; Found MW: 2708.0.

[1920] Synthesis of Oligonucleotide ONT-101: (Sp, Rp, Sp, Rp, Sp, Rp, Sp)-gscscsuscscsasg. t_{R} (IEX-HPLC): 16.23 min. Calc MW: 2709.2; Found MW: 2708.2.

[1921] Synthesis of Oligonucleotide ONT-103: (Rp, Rp, Sp, Sp, Sp, Rp, Rp)-gscscsuscscsasg. t_{R} (IEX-HPLC): 16.26 min. Calc MW: 2709.2; Found MW: 2707.8.

[1922] Synthesis of Oligonucleotide ONT-105: (Sp, Sp, Rp, Rp, Rp, Sp, Sp)-gscscsuscscsasg. t_{R} (IEX-HPLC): 16.22 min. Calc MW: 2709.2; Found MW: 2710.0.

[1923] Oligonucleotides containing stereodefined chimeric 2′-OMe phosphorothioate triester and 2′-O-MOE phosphorothioate triester internucleotidic linkages was synthesized on ABI 394DNA/RNA in an analogous fashion to those described in examples herein.

[1924] Synthesis of Oligonucleotide ONT-90: (All (Rp))-G_{MOE}sG_{MOE}susG_{MOE}sG_{MOE}sasasG_{MOE}sG_{MOE}sc (SEQ ID NO: 124). t_{R} (IEX-HPLC): 15.35 min. Calc MW: 3828.2; Found MW: 3826.5.

[1925] Synthesis of Oligonucleotide ONT-119: (All (Sp))-G_{MOE}sG_{MOE}susG_{MOE}sG_{MOE}sasasG_{MOE}sG_{MOE}sc (SEQ ID NO: 124). t_{R} (IEX-HPLC): 16.42 min. Calc MW: 3828.2; Found MW: 3827.2.

[1926] Synthesis of Oligonucleotide ONT-91: (All (Rp))-G_{MOE}scscsuscscsasg. t_{R} (IEX-HPLC): 15.69 min. Calc MW: 2753.3; Found MW: 2751.5.

[1927] Synthesis of Oligonucleotide ONT-120: (All (Sp))-G_{MOE}scscsuscscsasg. t_{R} (IEX-HPLC): 14.71 min. Calc MW: 2753.3; Found MW: 2751.4.

### Example 66. General IEX-HPLC Method for the Analysis of Crude and Purified DMT Off RIPtide Oligonucleotides

### Buffer A: 10 mM TrisHCl, 50% ACN, pH 8.0

### Buffer B: 10 mM TrisHCl, 800 mM NaClO₄, 50% ACN, pH 8.0

### Column: DIONEX, DNAPac, PA-200, Analytical, 4.0×250 mm

[1928] Column temperature=60° C.
Signal monitored at 254 and 280 nm

### Gradient Used:

| Time (min) | Flow (mL/min) | % A | % B | Curve |
|---|---|---|---|---|
| Initial | | 95 | 5 | |
| 2 | 1 | 95 | 5 | 1 |
| 22 | 1 | 70 | 30 | 6 |
| 25 | 1 | 5 | 95 | 6 |
| 25.5 | 1 | 95 | 5 | 6 |
| 30 | 1 | 95 | 5 | 1 |

### Example 67. General UPLC-LCMS Method for the Analysis of Purified DMT Off RIPtide Oligonucleotides

### Buffer A: 15 mM TEA, 400 mM HFIP, Water

### Buffer B: 50:50 Buffer A/Methanol

### Column: UPLC@OST C₁₈ 1.7 μm, 2.1×500 mm

[1930] Column temperature=50° C.

### Gradient Used:

| Time (min) | Flow (mL/min) | % A | % B | Curve |
|---|---|---|---|---|
| Initial | 0.2 | 80 | 20 | |
| 2 | 0.2 | 80 | 20 | 1 |
| 22 | 0.2 | 30 | 70 | 6 |
| 25 | 0.2 | 5 | 95 | 6 |
| 25.5 | 0.2 | 80 | 20 | 6 |
| 30 | 0.2 | 80 | 20 | 1 |

### Example 68. General IEX-HPLC Method for the Purification of Crude DMT Off RIPtide Oligonucleotide

### Buffer A: 20 mM NaOH, pH 11.0

### Buffer B: 20 mM NaOH, 2.5 M NaCl, pH 11.0

[1932] Column: Empty column Waters AP-1 (Waters), custom in-house packed with Source 15Q support (GE Healthcare). The same purification column was used for the different stereopure RIPtide oligonucleotides.
Instrument: AKTA Purifier, equipped with the P-900 pump, the UPC-900 detector and a 50 mL injection SuperLoop (GE Healthcare)
Buffer heater temperature set=70° C.
Column heater tape set=70° C.
Signal monitored at 254 nm
Fractions volume: 5 mL

### Gradient Used:

| Time (min) | Flow (mL/min) | % A | % B | Curve |
|---|---|---|---|---|
| Initial | | 100 | 0 | |
| 15 | 4 | 100 | 0 | 1 |
| 25 | 4 | 90 | 10 | 6 |
| 35 | 4 | 90 | 10 | 1 |
| 45 | 4 | 80 | 20 | 6 |
| 60 | 4 | 80 | 20 | 1 |
| 80 | 4 | 65 | 35 | 6 |
| 95 | 4 | 65 | 35 | 1 |
| 120 | 4 | 45 | 55 | 6 |
| 125 | 4 | 45 | 55 | 1 |
| 126 | 4 | 100 | 0 | 6 |
| 140 | 4 | 100 | 0 | 1 |

[1934] Collected fractions were individually analyzed by analytical IEX-HPLC using the analytical conditions and gradient described above. Pure fractions were pooled in order to provide purified material of 95% and above purity as determined by the 254 nm UV absorbance profiles.

[1935] General RP-Sep-Pak method for the desalting of purified RIPtides oligonucleotides. The solution of pooled pure fractions was loaded on a Sep-Pak cartridge (Waters, Sep-Pak Vac 35 cc (10 g) Cis Cartridges) pre-conditioned with water. After loading of the sample (100 mL), the cartridge was washed with milli Q water (50 mL) to remove all salt and then washed with 50% ACN/water to elute the full length desalted RNA oligonucleotide. The collected solution was concentrated in vacuo to a volume of 5 mL and lyophilized from water.

[1936] A panel of stereocontrolled fully phosphorothioate modified RIPtides (8-mer or 10-mer) that bind naked hTR are investigated for the in vitro inhibition of the activity of the telomerase RNP complex. The Cy5-TRAP assay (Shay et al., Nat. Protoc., 2006, 1, 1583), a variation of the TRAP (Shay et al., Science, 1994, 266, 2011), is used to the determine the IC₅₀ values for the stereocontrolled phosphorothioate RIPtides using HeLa cell extracts, according to previously reported protocols (Verdine et al., J. Biol. Chem., 2012, 287, 18843).

[1937] TRAP assays are performed following previously reported protocols that use fluorescence as a quantitation system, with some modifications. Briefly, extension of a fluorescent artificial substrate by telomerase is carried out for 30 minutes at 30° C., followed by amplification with 30 PCR cycles (34° C. 30 s, 59° C. 30 s, 72° C. 1 min). The inhibitory potential of the RIPtides is initially assessed in HeLa cell extracts, in duplicate experiments, using a 600 μM-60 μM concentration range. Experiments with selected RIPtides are repeated for a concentration range of 0.06 μM-60 μM in HeLa, DU145 (prostate cancer) and HEK293 cell extracts. Several controls are used in these assays: a positive control (untreated cell lysate), negative controls (buffer only, heat inactivated and RNase treated cell extracts), and PCR amplification control (60 μM of RIPtide added after telomerase elongation and before PCR). In certain embodiments, chirally controlled RIPtide preparations show enhanced inhibition of hTR as compared with the positive control and/or enhanced inhibition of hTRas compared with the negative control; in some embodiments, some, but optionally not all RIPtides of a given sequence show such properties. In some embodiments, by “enhanced” in this context is meant enhanced by between about five-fold and about ten-fold. In some embodiments, by “enhanced” is meant at least about 1.5, 2.0, 2.5, 3.0, 3.5, 4.0, 4.5, 5.0, 5.5, 6.0, 6.5, 7.0, 7.5, 8.0, 8.5, 9.0, 9.5, or 10.0-fold.

[1938] Cell Culturing Conditions. The transformed embryonic kidney cell line HEK293 and the prostate cancer cell line DU145 are maintained in DMEM supplemented with 10% fetal bovine serum in 5% CO₂ at 37° C. Soluble cell extracts for TRAP assays are prepared by detergent lysis of 106 cells with 200 μL 1×CHAPS Lysis Buffer (Chemicon) as described in the manufacturer's instructions.

[1939] According to the present invention, different potenties and/or different other properties may be observed for the various stereoarchitectures of fully stereocontrolled phosphorothioate RIPtides. For instance, RIPtide properties such as: nuclease resistance, tissue accumulation, cell penetration, endosomal escape, tridimensional structure of the RIPtide, affinity towards the target folded hTR RNA, immunestimulation, duration of action, pharmacokinetics, etc. may vary for chirally controlled RIPtide preparations that share the same sequence but differ from one another with respect to different location and/or stereochemistry of one or more chiral phosphorothioate backbone linkages.

### Example 69: Chirally Controlled Oligonucleotide Compositions Show Different Activity In Vivo as Compared with Chirally Uncontrolled Compositions Having the Same Sequence

[1940] The present Example compares in vivo pharmacological activity of chirally pure oligonucleotides with that observed for the “parent” stereorandom mixture (i.e., for a composition containing oligonucleotides of the same sequence as the chirally pure oligonucleotides but not displaying chiral purity, for example as a result of having been prepared via a stereorandom process). Four chirally pure oligonucleotides, each of which had a sequence complementary to that of a particular target transcript or gene encoding a protein of interest were synthesized, formulated, and administered twice per week for 5 weeks at two dose levels each, to animals expressing the target gene. Levels of encoded protein levels were quantified. In this Example, oligonucleotides having a sequence antisense to (and therefore targeting) human Apolipoprotein-B (ApoB) were used for proof-of-concept in transgenic mice expressing human ApoB.

### Test Articles

[1941] Test articles were PBS alone (i.e., no oligonucleotide control) or the relevant oligonucleotide composition (i.e., Mipomersen (ONT-41), ONT-75, ONT-77, ONT-80, or ONT-81 oligonucleotides (see Example 52 for structures) were formulated in 1×PBS (diluted from 10× PBS (Life Technologies, AM9624) using nuclease-free water (Qiagen, 129115)) at 0.5 and 1 mg/mL for dosing at 5 and 10 mg/kg, respectively. Formulations were based on absolute mass with no adjustment for the active material. Oligonucleotide concentrations were confirmed by measurement with a Carry-100 UV-Vis (Agilent Technologies). Samples of all test articles were checked for endotoxin levels using a kinetic pyrochrome chromogenic endotoxin assay (Associates of Cape Cod, 1500-5, E005-5). All tested samples were found to have a lower amount of endotoxin than the 0.5 EU/ml acceptable limit.

### Animals and In Vivo Procedures

[1942] Female transgenic mice (huApoB mice) expressing high plasma concentrations of human apolipoprotein B100 and lipoprotein(a) (J. Clin. Invest. 92: 3029-3037) were obtained from Taconic (strain B6. SJL-Tg(APOB)l 102Sgy N20+?, model #1004-F). All animals were genotyped prior to delivery.

[1943] Mice were delivered and allowed to acclimate for at least seven days prior to study start. All mice were given regular chow and water ad libitum, and were not fasted prior to compound administration. Mice were randomized to study groups, and dosed intraperitoneally (IP) at 10 ml/kg on Days 1, 4, 8, 11, 15, 18, 22, 25, 29 and 32, based on individual mouse body weight measured prior to dosing on each dosing day. Blood was collected during the course of the study on Days 0 (day before first dose), 17, 24, 31, 38, 45, 52 and 60 by submandibular (cheek) bleed and at sacrifice on Day 66 by cardiac puncture, and then processed to serum.

### Apolipoprotein B Protein Assay

[1944] ApoB protein levels in serum were measured using an ApoB Human ELISA Kit (Abcam, ab108807). Serum samples were diluted 1:20,000 and assayed per the kit recommended protocol without modifications. Automated washes were done with 30 second soak periods using an Aquamax 4000 (Molecular Devices). Reactions were stopped after 12 minute incubations with Chromogen substrate and measurements were taken with a Spectramax M5 (Molecular Devices).

[1945] Standard curves were generated by plotting the standard concentration on the x-axis and the corresponding mean 450 nm absorbance on the y-axis. The best-fit line was determined by regression analysis using log-log curve-fit. Each assay plate included a negative (PBS treated) and a positive (Mipomersen-treated) control and each mouse serum sample was assayed in 4 technical replicates.

[1946] For each sample, the mean absolute level of ApoB was normalized to the mean value for the PBS treated group, to obtain the relative level of ApoB protein expression. In one instance, an animal was excluded from the analysis as measurements deviated from the cohort mean by 2 standard deviations. Relative levels of ApoB protein expression were used for statistical analysis (Graphpad Prism) by 2-way ANOVA followed by Newman-Keuls post-hoc test. Results

[1947] The results are shown in Table E-28a and FIG. 40. Relative to PBS, 5 mg/kg IP ONT-75 resulted in significant reductions of serum ApoB protein levels on day 24 of the study, to 87% (p<0.05). Relative to PBS, 5 mg/kg IP ONT-77 resulted in significant reductions of serum ApoB protein levels on days 24, and 31 of the study, to 72% (p<0.000 1), 81% (p<0.05) of control levels, respectively. Relative to PBS, 5 mg/kg IP ONT-80 resulted in significant reductions of serum ApoB protein levels on days 24 and 31 of the study, to 83% (p<0.05), 80% (p<0.05) of control levels, respectively. Relative to PBS, 5 mg/kg IP ONT-81 resulted in significant reductions of serum ApoB protein levels on days 17 and 24 of the study, to 85% (p<0.05), 70% (p<0.0001) of control levels, respectively.

TABLE E-28a
Serum Human Apolipoprotein B Levels Relative to PBS
After Multiple IP Doses of 5 mg/kg Stereioisomer or
Mipomersen in huApoB Mice (N = 4-5]

| | Day | | | | |
|---|---|---|---|---|---|
| Sample | 17 | 24 | 31 | 38 | 45 |
| PBS | 100 ± 9 | 100 ± 9 | 100 ± 9 | 100 ± 11 | 100 ± 9 |
| ONT-41 | 54 ± 11 | 49 ± 7 | 54 ± 9 | 64 ± 10 | 80 ± 9 |
| ONT-75 | 103^{d} ± 11 | 87^{dw} ± 10 | 94^{d} ± 10 | 97^{d} ± 10 | 98^{a} ± 9 |
| ONT-77 | 83^{d} ± 15 | 72^{cz} ± 10 | 81^{dw} ± 9 | 91^{d} ± 13 | 95^{a} ± 12 |
| ONT-80 | 89^{d} ± 9 | 83^{dw} ± 8 | 80^{dw} ± 3 | 95^{d} ± 7 | 87 ± 11 |
| ONT-81 | 85^{dw}± 12 | 70^{cz} ± 5 | 88^{d} ± 15 | 101^{d} ± 10 | 102^{b} ± 7 |

^{a}Statistically different from the Mipomersen control group (ONT-41), with p < 0.05 (2-way ANOVA with Newman-Keuls post-hoc test)
^{b}Statistically different from the Mipomersen control group (ONT-41), with p < 0.01 (2-way ANOVA with Newman-Keuls post-hoc test)
^{c}Statistically different from the Mipomersen control group (ONT-41), with p < 0.001 (2-way ANOVA with Newman-Keuls post-hoc test)
^{d}Statistically different from the Mipomersen control group (ONT-41), with p < 0.0001 (2-way ANOVA with Newman-Keuls post-hoc test)
^{w}Statistically different from the PBS control group, with p < 0.5 (2-way ANOVA with Newman-Keuls post-hoc test)
^{x}Statistically different from the PBS control group, with p < 0.01 (2-way ANOVA with Newman-Keuls post-hoc test)
^{y}Statistically different from the PBS control group, with p < 0.001 (2-way ANOVA with Newman-Keuls post-hoc test)
^{z}Statistically different from the PBS control group, with p < 0.0001 (2-way ANOVA with Newman-Keuls post-hoc test)

[1948] Compared with 5 mg/kg IP Mipomersen, ONT-75 administered with the same dosing paradigm resulted in significantly less reduction of serum ApoB protein levels on days 17, 24, 31 and 38 (p<0.0001), and 45 (p<0.05) of the study. Compared with 5 mg/kg IP Mipomersen, ONT-77 administered with the same dosing paradigm resulted in significantly less reduction of serum ApoB protein levels on days 17, 31 and 38 (p<0.0001), 24 (p<0.001) and 45 (p<0.05) of the study. Compared with 5 mg/kg IP Mipomersen, ONT-80 administered with the same dosing paradigm resulted in significantly less reduction of serum ApoB protein levels on days 17, 24, 31 and 38 (p<0.0001), but was not different on day 45 (p>0.05) of the study. Compared with 5 mg/kg IP Mipomersen, ONT-81 administered with the same dosing paradigm resulted in significantly less reduction of serum ApoB protein levels on days 17, 31 and 38 (p<0.0001), 24 (p<0.001) and 45 (p<0.01) of the study. FIG. 40 shows the timecourse of Serum Human Apolipoprotein B protein levels relative to PBS after 5 mg/kg stereoisomer or mipomersen IP dosing in huApoB mice. Downward arrows indicate dosing days. Group means normalized to the PBS control group are shown, where each groups comprised 4-5 animals. Error bars represent standard deviations.

[1949] The results of the 10 mg/kg dosing paradigm are shown in Table E-28b and FIG. 53. Relative to PBS, 10 mg/kg IP ONT-75 resulted in significant reductions of serum ApoB protein levels on days 17, 24 and 38 of the study, to 78% (p<0.0001), 76% (p<0.0001) and 82% (p<0.001), respectively. Relative to PBS, 10 mg/kg IP ONT-77 resulted in significant reductions of serum ApoB protein levels on days 17, 24, 31, 38, 45 and 52 of the study, to 62% (p<0.0001), 61% (p<0.0001), 54% (p<0.0001), 59% (p<0.0001), 72% (p<0.0001), and 73% (p<0.0001) of control levels, respectively. Relative to PBS, 10 mg/kg IP ONT-80 resulted in significant reductions of serum ApoB protein levels on days 17, 24, 31, 38, 45, 52 and 66 of the study, to 55% (p<0.0001), 59% (p<0.0001), 73% (p<0.0001), 67% (p<0.0001), 76% (p<0.0001), 76% (p<0.0001), and 80% (p<0.01l) of control levels, respectively. Relative to PBS, 10 mg/kg IP ONT-81 resulted in significant reductions of serum ApoB protein levels on days 17, 24, 31, 38 and 45 of the study, to 49% (p<0.0001), 62% (p<0.0001), 71% (p<0.0001), 74% (p<0.0001) and 79% (p<0.001) of control levels, respectively.

TABLE E-28b
Serum Human Apolipoprotein B Levels Relative to PBS After Multiple IP Doses of 10 mg/kg
Stereioisomer (ONT-75, -77, -80 or -81) or Mipomersen in huApoB Mice (N = 4-5)

| | Day | | | | | | | |
|---|---|---|---|---|---|---|---|---|
| Sample | 17 | 24 | 31 | 38 | 45 | 52 | 60 | 66 |
| PBS | 100 ± 11 | 100 ± 9 | 100 ± 17 | 100 ± 11 | 100 ± 7 | 100 ± 7 | 100 ± 9 | 100 ± 7 |
| ONT-41 | 31 ± 13 | 24 ± 24 | 23 ± 6 | 29 ± 10 | 46 ± 10 | 64 ± 8 | 77 ± 8 | 64 ± 7 |
| ONT-75 | 78^{dz} ± 5 | 76^{dz} ± 4 | 82^{dy} ± 7 | 95^{d} ± 9 | 97^{d} ± 3 | 94^{d} ± 13 | 108^{d} ± 6 | 87^{c} ± 12 |
| ONT-77 | 62^{dz} ± 9 | 61^{dz} ± 4 | 54^{dz} ± 6 | 59^{dz} ± 10 | 72^{dz} ± 7 | 73^{z} ± 7 | 95^{a} ± 5 | 87^{b} ± 11 |
| ONT-80 | 55^{cz} ± 4 | 59^{dz} ± 3 | 73^{dz} ± 4 | 67^{dz} ± 10 | 76^{dz} ± 10 | 76^{z} ± 11 | 87 ± 10 | 80^{bx} ± 7 |
| ONT-81 | 49^{bz} ± 7 | 62^{dz} ± 19 | 71^{dz} ± 7 | 74^{dz} ± 7 | 79^{dy} ± 11 | 88^{c} ± 5 | 90 ± 6 | 89^{c} ± 8 |

^{a}Statistically different from the Mipomersen control group (ONT-41), with p < 0.05 (2-way ANOVA with Newman-Keuls post-hoc test)
^{b}Statistically different from the Mipomersen control group (ONT-41), with p < 0.01 (2-way ANOVA with Newman-Keuls post-hoc test)
^{c}Statistically different from the Mipomersen control group (ONT-41), with p < 0.001 (2-way ANOVA with Newman-Keuls post-hoc test)
^{d}Statistically different from the Mipomersen control group (ONT-41), with p < 0.0001 (2-way ANOVA with Newman-Keuls post-hoc test)
^{w}Statistically different from the PBS control group, with p < 0.05 (2-way ANOVA with Newman-Keuls post-hoc test)
^{x}Statistically different from the PBS control group, with p < 0.01 (2-way ANOVA with Newman-Keuls post-hoc test)
^{y}Statistically different from the PBS control group, with p < 0.001 (2-way ANOVA with Newman-Keuls post-hoc test)
^{z}Statistically different from the PBS control group, with p < 0.0001 (2-way ANOVA with Newman-Keuls post-hoc test)

[1950] Compared with 10 mg/kg IP Mipomersen, ONT-75 administered with the same dosing paradigm resulted in significantly lower reduction (knockdown) of serum ApoB protein levels on days 17, 24, 31, 38, 45, 52, 60 (p<0.0001), and 66 (p<0.001) of the study. Compared with 10 mg/kg IP Mipomersen, ONT-77 administered with the same dosing paradigm resulted in significantly lower reduction (knockdown) of serum ApoB protein levels on days 17, 24, 31, 38, and 45 (p<0.0001), 60 (p<0.05) and 66 (p<0.01) of the study. Compared with 10 mg/kg IP Mipomersen, ONT-80 administered with the same dosing paradigm resulted in significantly lower reduction (knockdown) of serum ApoB protein levels on days 24, 31, 38 and 45 (p<0.0001), 17 (p<0.001) and 66 (p<0.01). Compared with 10 mg/kg IP Mipomersen, ONT-81 administered with the same dosing paradigm resulted in significantly lower reduction (knockdown) of serum ApoB protein levels on days 24, 31, 38 and 45 (p<0.0001), 17 (p<0.01), 52 and 66 (p<0.001) of the study.

[1951] By day 38 (i.e. 6 days after the last dose), serum ApoB protein levels had returned to baseline after ONT-75. Considering the initial serum ApoB protein level reduction, the rate of return to baseline of serum ApoB protein was slower after ONT-77 and ONT-80 and the level of serum ApoB protein is similar to Mipomersen levels by day 52.

[1952] The results of the 5 mg/kg dosing paradigm of additional stereopure architectures are shown in Table E-28c and FIG. 54. Relative to PBS, 5 mg/kg IP ONT-87 resulted in significant reductions of serum ApoB protein levels on days 17, 24, 31 and 38 of the study, to 27% (p<0.0001), 40% (p<0.0001), 55% (p<0.0001) and 71% (p<0.0001) of control levels, respectively. Relative to PBS, 5 mg/kg IP ONT-88 resulted in significant reductions of serum ApoB protein levels on days 17, 24, 31 and 38 of the study, to 47% (p<0.0001), 34% (p<0.0001), 69% (p<0.0001l) and 85% (p<0.0001l) of control levels, respectively. Relative to PBS, 5 mg/kg IP ONT-89 resulted in significant reductions of serum ApoB protein levels on days 17, 24 and 31 of the study, to 43% (p<0.000l), 48% (p<0.0001) and 85% (p<0.05) of control levels, respectively.

TABLE E-28c
Serum Human Apolipoprotein B Levels Relative to PBS After
Multiple IP Doses of 5 mg/kg Stereioisomer (ONT-87,
-88 or -89) or Mipomersen in huApoB Mice (N = 3-4)

Day

| SAMPLES | 17 | 24 | 31 | 38 |
|---|---|---|---|---|
| PBS | 100 ± 5 | 100 ± 12 | 100 ± 4 | 100 ± 8 |
| ONT-41 | 33^{z} ± 3 | 44^{z} ± 2 | 75^{y} ± 11 | 76^{y} ± 8 |
| ONT-87 | 27^{z} ± 11 | 40^{z} ± 5 | 55^{bz} ± 8 | 71^{z} ± 7 |
| ONT-88 | 47^{az} ± 5 | 34^{z} ± 8 | 69^{z} ± 13 | 85^{z} ± 7 |
| ONT-89 | 43^{z} ± 9 | 48^{z} ± 6 | 85^{w} ± 12 | 93^{a} ± 7 |

^{a}Statistically different from the Mipomersen control group (ONT-41), with p < 0.05 (2-way ANOVA with Newman-Keuls post-hoc test)
^{b}Statistically different from the Mipomersen control group (ONT-41), with p < 0.01 (2-way ANOVA with Newman-Keuls post-hoc test)
c: Statistically different from the Mipomersen control group (ONT-41), with p < 0.001 (2-way ANOVA with Newman-Keuls post-hoc test)
d: Statistically different from the Mipomersen control group (ONT-41), with p < 0.0001 (2-way ANOVA with Newman-Keuls post-hoc test)
^{w}Statistically different from the PBS control group, with p < 0.05 (2-way ANOVA with Newman-Keuls post-hoc test)
x: Statistically different from the PBS control group, with p < 0.01 (2-way ANOVA with Newman-Keuls post-hoc test)
^{y}Statistically different from the PBS control group, with p < 0.001 (2-way ANOVA with Newman-Keuls post-hoc test)
^{z}Statistically different from the PBS control group, with p < 0.0001 (2-way ANOVA with Newman-Keuls post-hoc test)

[1953] Compared with 5 mg/kg IP Mipomersen, ONT-87 administered with the same dosing paradigm resulted in significantly higher reduction (knock-down) of serum ApoB protein levels on day 31, (p<0.01) of the study. Compared with 5 mg/kg IP Mipomersen, ONT-88 administered with the same dosing paradigm resulted in significantly lower reduction (knock-down) of serum ApoB protein levels on day 17 (p<0.05 of the study). Compared with 5 mg/kg IP Mipomersen, ONT-89 administered with the same dosing paradigm resulted in significantly lower reduction (knockdown) of serum ApoB protein levels on day 38 (p<0.05) of the study.

[1954] The results of the 10 mg/kg dosing paradigm of additional stereopure architectures are shown in Table E-28d and FIGS. 55 and 56. Relative to PBS, 10 mg/kg IP ONT-87 resulted in significant reductions of serum ApoB protein levels on days 17, and 24 of the study, to 27% (p<0.0001), 14% (p<0.0001) of control levels, respectively. Relative to PBS, 10 mg/kg IP ONT-88 resulted in significant reductions of serum ApoB protein levels on days 17, and 24 of the study, to 23% (p<0.0001), and 17% (p<0.0001) of control levels, respectively. Relative to PBS, 10 mg/kg IP ONT-89 resulted in significant reductions of serum ApoB protein levels on days 17, and 24 of the study, to 29% (p<0.0001), and 23% (p<0.0001) of control levels, respectively.

TABLE E-28d
Serum Human Apolipoprotein B Levels Relative to PBS After
Multiple IP Doses of 10 mg/kg Stereioisomer (ONT-87,
-88 or -89) or Mipomersen in huApoB Mice (N = 3-4)

Day

| Sample | 17 | 24 |
|---|---|---|
| PBS | 100 ± 5 | 100 ± 8 |
| ONT-41 | 44^{z} ± 17 | 27^{z} ± 9 |
| ONT-87 | 27^{az} ± 10 | 14^{z} ± 3 |
| ONT-88 | 23^{az} ± 6 | 17^{z} ± 5 |
| ONT-89 | 29^{az} ± 12 | 23^{z} ± 8 |

^{a}Statistically different from the Mipomersen control group (ONT-41), with p < 0.05 (2-way ANOVA with Newman-Keuls post-hoc test)
b: Statistically different from the Mipomersen control group (ONT-41), with p < 0.01 (2-way ANOVA with Newman-Keuls post-hoc test)
c: Statistically different from the Mipomersen control group (ONT-41), with p < 0.001 (2-way ANOVA with Newman-Keuls post-hoc test)
d: Statistically different from the Mipomersen control group (ONT-41), with p < 0.0001 (2-way ANOVA with Newman-Keuls post-hoc test)
w: Statistically different from the PBS control group, with p < 0.05 (2-way ANOVA with Newman-Keuls post-hoc test)
x: Statistically different from the PBS control group, with p < 0.01 (2-way ANOVA with Newman-Keuls post-hoc test)
y: Statistically different from the PBS control group, with p < 0.001 (2-way ANOVA with Newman-Keuls post-hoc test)
^{z}Statistically different from the PBS control group, with p < 0.0001 (2-way ANOVA with Newman-Keuls post-hoc test)

[1955] Compared with 10 mg/kg IP Mipomersen, ONT-87 administered with the same dosing paradigm resulted in significantly higher reduction (knockdown) of serum ApoB protein levels on day 17, (p<0.05) of the study. Compared with 10 mg/kg IP Mipomersen, ONT-88 administered with the same dosing paradigm resulted in significantly higher reduction (knockdown) of serum ApoB protein levels on day 17 (p<0.05) of the study. Compared with 10 mg/kg IP Mipomersen, ONT-89 administered with the same dosing paradigm resulted in significantly higher reduction (knockdown) of serum ApoB protein levels on day 17 (p<0.05) of the study.

[1956] Thus, in at least some embodiments, the present invention provides chirally controlled oligonucleotide compositions that show a biological activity and are characterized by extended persistence and/or slower rate of decay of that activity over time as compared with an appropriate reference (e.g., a preparation of oligonucleotides of the same sequence but different chiral specificity, including particularly stereorandom preparations). In some embodiments where such extended persistence and/or slower rate of decay is observed, provided chirally controlled compositions may be administered according to a dosing regimen with fewer total doses and/or longer periods between two or more doses that is utilized with the “parent” stereorandom composition to achieve comparable biologic and/or therapeutic effect. For example, the slower return to baseline of serum ApoB protein following treatment with chirally pure oligonucleotide compared with Mipomersen as demonstrated in the present Example, suggests that chirally pure ApoB oligonucleotides can be dosed less frequently than the parental stereorandom mixture (e.g., than Mipomersen).

[1957] The results presented in this Example demonstrate, for instance, that chirally pure oligonucleotide compositions can have significantly different pharmacological activity in vivo as compared with an appropriate reference (e.g., a preparation of oligonucleotides of the same sequence but different chiral specificity, including particularly stereorandom preparations), and specifically as compared with a “parental” stereorandom preparation. Those skilled in the art, in light of this demonstration, will appreciate that chirally controlled oligonucleotide compositions provided by the present disclosure have unexpected activities and characteristics. Those skilled in the art, in light of the present disclosure, will further appreciate that various methodologies are provided, including therapeutic methods that utilize dosing regimens that differ from those utilized for non-chirally controlled compositions (e.g., of the same nucleotide sequence). In some embodiments, relatively larger individual doses of chirally controlled (e.g., chirally pure) oligonucleotides may be utilized as compared with a control (e.g., a stereorandom control). In some embodiments, relatively smaller individual doses of chirally controlled (e.g., chirally pure) oligonucleotides may be utilized as compared with a control (e.g., a stereorandom control). In some embodiments, relatively fewer doses of chirally controlled (e.g., chirally pure) oligonucleotides may be utilized as compared with a control (e.g., a stereorandom control) within a given period of time.

### Example 70: siRNA Agents Comprising Chirally Controlled Oligonucleotides Inhibit PCSK-9

[1958] The present Example demonstrates successful inhibition of target gene expression using siRNA agents comprised of chirally controlled oligonucleotides as described herein. Specifically, this Example describes hybridization of individual oligonucleotide strands prepared through chirally controlled synthesis as described herein, so that double-stranded chirally controlled siRNA oligonucleotide compositions are provided. This Example further demonstrates successful transfection of cells with such agents and, moreover, successful inhibition of target gene expression.

siRNA Transfection of Chiral siRNA Molecules

[1959] Hep3B, or HeLa cells were reverse transfected at a density of 2.0×10⁴ cells/well in 96-well plates. Transfection of siRNA was carried out with lipofectamine RNAiMax (Life Technologies, cat. No. 13778-150) using the manufacturer's protocol, except with a decreased amount of Lipofectamine RNAiMax of 0.2 ul per well. Twelve, 1:3 siRNA duplex dilutions were created starting at 1 uM. 10 ul of 10×siRNA duplex was then lipoplexed with a prepared mixture of 9.8 ul of serum-free medium and 0.2 ul of Lipofectamine RNAiMax per well. After a 10-15 minute incubation. 2.0×10⁴ cells in 80 ul of EMEM cell growing media (ATCC, 30-2003) were added to bring the final volume to 100 ul per well. Two separate transfection events were performed for each dose.

[1960] 24 hours after transfection Hep3B or HeLa cells were lysed and PCSK9 mRNA was purified using MagMAX™-96 Total RNA Isolation Kit (Life Technologies, AM1830); 15 ul of cDNA was synthesized with High Capacity cDNA Reverse Transcription Kit with RNase Inhibitor (Life Technologies, 4374967). Gene expression was evaluated by Real-Time PCR on a Lightcycler 480 (Roche) using a Probes Master Mix (Roche, 04 707 494 001) according to manufacturer's protocol using a FAM-labeled Taqman probe-set for PCSK9 (Life Technologies, Hs03037355_m1) and a VIC-labeled GAPDH primer-limited endogenous control (Life Technologies, NM_002046.3).

### IC50s and Data Analysis

[1961] Delta delta Ct method was used to calculate values. Samples were normalized to hGAPDH and calibrated to mock transfected and untreated samples. A stereo-random molecule was used as positive control. The data are represented as a mean of 2 biological replicates using Graphpad Prism. A four-parameter linear regression curve was fitted to the data and the bottom and top were constrained to a 0 and 100 constants respectively in order to calculate a relative IC50.

TABLE E-29
Relative IC50 values [Hep3B Transfection]

| | | | LogIC50 | | HillSlope | | IC50 |
|---|---|---|---|---|---|---|---|
| | Bottom | Top | Mean | SEM | Mean | SEM | [nM] |
| ONT-D1 | 0 | 100 | −0.39 | 0.12 | −0.27 | 0.02 | 0.41 |
| ONT-D2 | 0 | 100 | −0.85 | 0.14 | −0.24 | 0.03 | 0.14 |
| ONT-D3 | 0 | 100 | −0.62 | 0.14 | −0.24 | 0.02 | 0.24 |
| ONT-D4 | 0 | 100 | −0.49 | 0.09 | −0.28 | 0.02 | 0.33 |
| ONT-D5 | 0 | 100 | −0.32 | 0.09 | −0.31 | 0.02 | 0.48 |

TABLE E-30
Relative IC50 values [HeLa Transfection]

| | | | LogIC50 | | HillSlope | | |
|---|---|---|---|---|---|---|---|
| | Bottom | Top | Mean | SEM | Mean | SEM | IC50 |
| ONT-D1 | 0 | 100 | −1.73 | 0.07 | −0.61 | 0.05 | 0.02 |
| ONT-D2 | 0 | 100 | −1.94 | 0.07 | −0.66 | 0.07 | 0.01 |
| ONT-D3 | 0 | 100 | −1.72 | 0.08 | −0.62 | 0.07 | 0.02 |
| ONT-D4 | 0 | 100 | −1.26 | 0.06 | −0.74 | 0.06 | 0.06 |
| ONT-D5 | 0 | 100 | −1.03 | 0.08 | −0.86 | 0.12 | 0.09 |

TABLE E-31
Relative IC50 values of siRNAs with 3 Phosporothioate
stereo-centers[HeLa Transfection]

| | | | LogIC50 | | HillSlope | | |
|---|---|---|---|---|---|---|---|
| | Bottom | Top | Mean | SEM | Mean | SEM | IC50 |
| ONT-D7 | 0 | 100 | 0.75 | 0.15 | −0.24 | 0.02 | 5.60 |
| ONT-D8 | 0 | 100 | 0.39 | 0.09 | −0.32 | 0.02 | 2.45 |
| ONT-D9 | 0 | 100 | 0.43 | 0.13 | −0.22 | 0.02 | 2.68 |
| ONT-D10 | 0 | 100 | 1.57 | 0.20 | −0.27 | 0.03 | 36.86 |
| ONT-D11 | 0 | 100 | 2.92 | 0.33 | −0.12 | 0.01 | 839.42 |
| ONT-D12 | 0 | 100 | −0.17 | 0.10 | −0.38 | 0.03 | 0.68 |
| ONT-D13 | 0 | 100 | 1.20 | 0.21 | −0.39 | 0.08 | 15.97 |
| ONT-D14 | 0 | 100 | −0.22 | 0.18 | −0.43 | 0.07 | 0.60 |
| ONT-D15 | 0 | 100 | −0.25 | 0.16 | −0.41 | 0.06 | 0.57 |

[1962] FIGS. 45-50 present results of these studies. FIG. 45 shows the % PCSK-9 mRNA remaining after Hep3B treatment with siRNA duplex. FIG. 46 shows the % PCSK-9 mRNA remaining after Hep3B treatment with siRNA duplex curve fit. FIG. 47 shows the % PCSK-9 mRNA remaining after HeLa treatment with siRNA duplex. FIG. 48 shows the % PCSK-9 mRNA remaining after HeLa treatment with siRNA duplex curve fit. FIG. 49 shows the % PCSK-9 mRNA remaining after HeLa treatment with siRNA duplex containing 3 Phophorothiate stereo-centers. FIG. 50 shows the % PCSK-9 mRNA remaining after HeLa treatment with siRNA duplex containing 3 Phophorothiate stereo-centers curve fit.

[1963] As can be seen, in molecules with a single stereochemically defined phosphorothioate in each strand, a slightly increased potency was observed with molecules with Sp stereo-chemistry at the phosphorothioate in both sense and antisense strands While the specifically exemplified siRNA agents contained only one chiral center per strand, those skilled in the art, reading the present disclosure, will recognize the significance of the demonstrated differential effect as proof of principle that presence of chirality can impact activity.

[1964] The impact of chirality is more pronounced in siRNAs with more than two stereo-centers. In siRNAs with 3 chiral phosphorothioates (one in the sense strand and two in the antisense strand), an Sp stereochemistry at the 5′ end (between nucleotides n1 and n2) combined with a Rp stereochemistry at the 3′ end (between nucleotides n20 and n21) of the antisense strand had deleterious effect on potency. However, an Rp stereochemistry at the 5′ end (between nucleotides n1 and n2) combined with a Sp stereochemistry at the 3′ end (between nucleotides n20 and n21) of the antisense strand showed a significant PCSK-9 mRNA knockdown improvement over stereo-random control siRNA. The results suggest that both strands are affected by the stereochemistry of the phosphorothioate. It is likely that the observed efficacy differential will increase for agents with larger numbers of chiral centers and, moreover that both location and type of chiral center can impact activity, for example through effects on stability, potency, and/or both. Those skilled in the art, reading the present disclosure, will therefore appreciate that it provides teachings of both single and double-stranded chirally controlled oligonucleotide compositions. and uses thereof that, in at least some embodiments, distinguish such chirally controlled oligonucleotides and agents from stereorandom agents of identical sequence.

### Example 71. Additional Exemplary Oligonucleotides and Synthesis Thereof

[chemical structure]

[1966] Oligonucleotides N101-N104 were synthesized using the automated synthesis on ABI-394 DNA/RNA synthesizer according to the synthetic cycle summarized on Table E-32, using 1 μmol synthesis column and 1.7 μmol of oxalyl linked dG^{CE,Pac} on HCP. The synthesis cycle was performed with removal of the terminal 5′-O-DMTr group (DMT Off). After completion of the automated oligonucleotide synthesis, the HCP support was washed with dry ACN and dried under vacuum. The dry HCP was placed in a plastic vial and was treated with 1 mL of sat. NH₃/Py for 1 h at 55° C. then 1 mL of dry propylamine in dry pyridine (in a 1:4 ratio) for 18 h at RT. The solvents were then evaporated and the residue was re-suspended with ˜pH 1.5 HCI aqueous solution containing 10% DMSO and the HCP support was filtered off. The crude product was purified by reverse phase preparative HPLC (According to the procedure described below). The fractions having purity above 95% were pooled, concentrated and desalted by reverse-phase HPLC (According to the procedure described below). The final desalted product was lyophilized from water.

TABLE E-32
Summary for Oligonucleotide Synthesis on a DNA/RNA Synthesizer ABI-394
Used for the Synthesis of oligonucleotides N101-N102.

| | | | delivery time | |
|---|---|---|---|---|
| step | reaction | reagent | (sec) | wait time (sec) |
| 1 | detritylation | 3% TCA in DCM | 3 + 60 + 10 | N.A. |
| 2 | coupling | 0.15M phosphoramidite in | 5 + 4 | 30 + 600 |
| | | ACN + 1.2M CMPT in | | |
| | | ACN | | |
| 3 | capping 1 | 5% Pac₂O in THF/2,6- | 20 | 60 |
| | | lutidine | | |
| 4 | capping 2 | 5% Pac₂O in THF/2,6- | 20 | 60 |
| | | lutidine + 16% NMI in | | |
| | | THF | | |
| 5 | sulfurization | 0.3M S-(N- | 7 + 1.5 × 4 | 360 + 3 × 180 + |
| | | methylpiperazinoethyl- | | 900 |
| | | ToluylThioSulfonate | | |
| | | [chemical structure] in ACN/BSTFA | | |

### Example 72. HPLC method for N101 and N102

[1967] Buffer A: 50 mM TEAA, pH 9.6 (adjusted with TEA)

### Buffer B: ACN

### Column: XBridge C₈, 3.5 μm, 4.6×50 mm, Part #186003034

[1968] Buffer heater set temperature=35° C.
Signal monitored at 254 and 280 nm

### Gradient Used:

| Time | Flow (ml/min) | % A | % B | Curve |
|---|---|---|---|---|
| Initial | | 99 | 1 | |
| 2 | 1 | 99 | 1 | 1 |
| 22 | 1 | 70 | 30 | 6 |
| 25 | 1 | 5 | 95 | 6 |
| 25.5 | 1 | 5 | 95 | 6 |
| 30 | 1 | 99 | 1 | 1 |

### Example 73. General UPLC-LCMS method for N101 and N102

[1970] Buffer A: 10 mM ammonium formate, pH 9.5 (adjusted with NH₃ aq.)

### Buffer B: ACN

### Column: UPLC@OST C₁₈ 1.7 μm, 2.1×500 mm

[1971] Column temperature=35° C.

### Gradient Used:

| Time (min) | Flow (mL/min) | % A | % B | Curve |
|---|---|---|---|---|
| Initial | 0.5 | 99 | 1 | |
| 2 | 0.5 | 99 | 1 | 1 |
| 12 | 0.5 | 60 | 40 | 6 |
| 13 | 0.5 | 5 | 95 | 6 |
| 13.5 | 0.5 | 5 | 95 | 6 |
| 15 | 0.5 | 99 | 1 | 1 |

### Example 74. General Purification Method for N101 and N102

[1973] Buffer A: 50 mM TEAA pH=9.6 (adjusted with TEA)

### Buffer B: ACN

### Column: XBridge Prep Cis, 5 μm, Cis, 250×10 mm, Part #186003256

[1974] Buffer heater set temperature=RT
Signal monitored at 254 and 280 nm

### Gradient Used:

| Time | Flow (ml/min) | % A | % B | Curve |
|---|---|---|---|---|
| Initial | | 99 | 1 | |
| 5 | 4 | 99 | 1 | 1 |
| 10 | 4 | 95 | 5 | 6 |
| 30 | 4 | 74 | 26 | 6 |
| 35 | 4 | 5 | 95 | 6 |
| 36 | 4 | 5 | 95 | 6 |
| 38 | 4 | 99 | 1 | 6 |
| 45 | 4 | 99 | 1 | 1 |

100 μL of 49-51% phosphoric acid was added to each fraction (pH 3) and checked by HPLC, then stored at −80° C. until frozen. The fractions were kept on lypholizer for a couple of hours until ½ volumes then stored at −80° C.

### Example 75. General Desalting Method for N101 and N102

[1976] Buffer A: 10 mM formic acid

### Buffer B: ACN

[1977] Column: XBridge Prep C₁₈, 5 μm, C₁₈, 250×10 mm, Part #186003256
Buffer heater set temperature=RT
Signal monitored at 254 and 280 nm

### Gradient Used:

| Time | Flow (ml/min) | % A | % B | Curve |
|---|---|---|---|---|
| Initial | | 100 | 0 | |
| 12 | 4 | 100 | 0 | 1 |
| 13 | 4 | 65 | 35 | 6 |
| 21 | 4 | 65 | 35 | 1 |
| 21.5 | 4 | 100 | 0 | 6 |
| 30 | 4 | 100 | 0 | 1 |

Collected fractions were stored in −80° C. until frozen and kept on lypholizer until dryness and checked by HPLC.

### Example 76. Synthesis of Oligonucleotide N101 (All-(Rp)-d[5m s16As16Gs16T]

[chemical structure]

[1980] Oligonucleotide N101 was synthesized as described above and purified. RT in RP-HPLC: (HPLC method N1): 15.9 min. UPLC/ESI-MS: Calcd: 1614.64; Found[+H]: 1615.06.

### Example 77. Synthesis of Oligonucleotide N102 (All-(Sp)-d[5mCs16As16Gs16T])

[1981] Oligonucleotide N102 was synthesized as described above and purified. RT in RP-HPLC (HPLC method N1): 16.4 min. UPLC/ESI-MS: Calcd: 1614.64; Found[+H]: 1614.97.

### Example 78. Synthesis of Oligonucleotide N103 (All-(Rp)-d[5mCs16As16Gs16Ts165mCs16Ts16Gs165mCs16Ts16Ts165mCs16G] (SEQ ID NO: 125))

[1982] Oligonucleotide N103 was synthesized as described above. RT in RP-HPLC (HPLC method N1): 18.4 min. UPLC/ESI-MS: Calcd for C₁₉₇H₃₁₁N₆₂O₆₂P₁₁S₁₁: 5233.38; Found: 5234.7.

### Example 79. Synthesis of Oligonucleotide N104 (All-(Sp)-d[5mCs16As16Gs16Ts165mCs16Ts16Gs165mCs16Ts16Ts165mCs16G] (SEQ ID NO: 125))

[1983] Oligonucleotide N104 was synthesized as described above. RT in RP-HPLC (HPLC method N1): 18.7 min. UPLC/ESI-MS: Calcd: 5233.38; Found: 5232.9.

[1984] Oligonucleotides N105-N106 were synthesized using the automated synthesis on ABI-394 DNA/RNA synthesizer according to the synthetic cycle summarized on Table E-33, using 1 μmol synthesis column and 1.7 μmol of oxalyl linked dG^{CE,Pac} on HCP. The synthesis cycle was performed with removal of the terminal 5′-O-DMTr group (DMT Off). After completion of the automated oligonucleotide synthesis, the HCP support was washed with dry ACN and dried under vacuum. The dry HCP was placed in a plastic vial and was treated with 1 mL of sat. NH₃/i-PrOH for 16 h at 55° C. The solvent was then evaporated and the residue was re-suspended with pH 7.0 aqueous solution containing 10% DMSO and the HCP support was filtered off. The crude product is purified by reverse phase preparative HPLC. The fractions having purity above 95% are pooled, concentrated and desalted by reverse-phase HPLC. The final desalted product is lyophilized from water.

TABLE E-33
Summary for Oligonucleotide Synthesis on a DNA/RNA Synthesizer ABI-394
Used for the Synthesis of oligonucleotides N105-N106.

| | | | delivery time | |
|---|---|---|---|---|
| step | reaction | reagent | (sec) | wait time (sec) |
| 1 | detritylation | 3% TCA in DCM | 3 + 60 + 10 | N.A. |
| 2 | coupling | 0.15M phosphoramidite in | 5 + 4 | 30 + 600 |
| | | ACN + 1.2M CMPT in | | |
| | | ACN | | |
| 3 | capping 1 | 5% Pac₂O in THF/2,6- | 20 | 60 |
| | | lutidine | | |
| 4 | capping 2 | 5% Pac₂O in THF/2,6- | 20 | 60 |
| | | lutidine + 16% NMI in | | |
| | | THF | | |
| 5 | sulfurization | [chemical structure] in ACN/BSTFA | 7 + 1.5 × 4 | 360 + 3 × 180 + 900 |

### Example 80. HPLC method for N101 and N102

### Buffer A: 50 mM TEAA, pH 7.0

### Buffer B: ACN

### Column: XBridge C₈, 3.5 μm, 4.6×150 mm, Part #186003034

[1985] Buffer heater set temperature=35° C.
Signal monitored at 254 and 280 nm

### Gradient Used:

| Time | Flow (ml/min) | % A | % B | Curve |
|---|---|---|---|---|
| Initial | | 99 | 1 | |
| 2 | 1 | 99 | 1 | 1 |
| 22 | 1 | 80 | 20 | 6 |
| 25 | 1 | 5 | 95 | 6 |
| 25.5 | 1 | 5 | 95 | 6 |
| 30 | 1 | 99 | 1 | 1 |

### Example 81. General UPLC-LCMS Method for N101 and N102

[1987] Buffer A: 10 mM ammonium formate, pH 7.0

### Buffer B: ACN

### Column: UPLC@OST C₁₈ 1.7 μm, 2.1×500 mm

[1988] Column temperature=35° C.

### Gradient Used:

| Time (min) | Flow (mL/min) | % A | % B | Curve |
|---|---|---|---|---|
| Initial | 0.5 | 99 | 1 | |
| 2 | 0.5 | 99 | 1 | 1 |
| 12 | 0.5 | 70 | 30 | 6 |
| 13 | 0.5 | 5 | 95 | 6 |
| 13.5 | 0.5 | 5 | 95 | 6 |
| 15 | 0.5 | 99 | 1 | 1 |

### Example 82. Synthesis of Oligonucleotide N105 (All-(Rp)-d[5mCs9As9Gs9T]

[chemical structure]

[1991] Oligonucleotide N105 was synthesized as described above. RT in RP-HPLC: (HPLC method N2): 14.1 min. UPLC/ESI-MS: Calcd: 1977.78; Found[−H]: 1978.8.

### Example 83. Synthesis of Oligonucleotide N106 (All-(Sp)-d[5mCs9As9Gs9T])

[1992] Oligonucleotide N106 was synthesized and purified as described above. RT in RP-HPLC (HPLC method N2): 14.7 min. UPLC/ESI-MS: Calcd: 1977.78; Found[−H]: 1977.37.

[1993] Oligonucleotides xxx were synthesized using the automated synthesis on ABI-394 DNA/RNA synthesizer according to the synthetic cycle summarized on Table E-33, using 1 μmol synthesis column and 1.7 μmol of oxalyl linked dG^{CE,Pac} on HCP. The synthesis cycle was performed with removal of the terminal 5′-O-DMTr group (DMT Off). After completion of the automated oligonucleotide synthesis, the HCP support was washed with dry ACN and dried under vacuum. The dry HCP was placed in a plastic vial and was treated with 1 mL of sat. NH₃/i-PrOH for 16 h at 55° C. The solvent was then evaporated and the residue was re-suspended with pH 7.0 aqueous solution containing 10% DMSO and the HCP support was filtered off. The crude product is purified by reverse phase preparative HPLC. The fractions having purity above 95% are pooled, concentrated and desalted by reverse-phase HPLC. The final desalted product is lyophilized from water.

TABLE E-34
Summary for Oligonucleotide Synthesis on a DNA/RNA
Synthesizer ABI-394.

| | | | delivery time | |
|---|---|---|---|---|
| step | reaction | reagent | (sec) | wait time (sec) |
| 1 | detritylation | 3% TCA in DCM | 3 + 60 + 10 | N.A. |
| 2 | coupling | 0.15M phosphoramidite in | 5 + 4 | 30 + 600 |
| | | ACN + 1.2M CMPT in | | |
| | | ACN | | |
| 3 | capping 1 | 5% Pac₂O in THF/2,6- | 20 | 60 |
| | | lutidine | | |
| 4 | capping 2 | 5% Pac₂O in THF/2,6- | 20 | 60 |
| | | lutidine + 16% NMI in | | |
| | | THF | | |
| 5 | sulfurization | [chemical structure] in ACN/BSTFA | 10 + 4 × 2 | 300 + 3 × 150 + 600 |

### Example 84. General Purification Method

### Buffer A: 50 mM TEAA

### Buffer B: ACN

[1994] Column: XBridge Prep C₁₈, 5 μm, C₁₈, 250×10 mm, Part #186003256
Buffer heater set temperature=rt
Signal monitored at 254 and 280 nm

### Gradient Used:

| Time | Flow (ml/min) | % A | % B | Curve |
|---|---|---|---|---|
| Initial | | 99 | 1 | |
| 5 | 4 | 99 | 1 | 1 |
| 10 | 4 | 95 | 5 | 6 |
| 30 | 4 | 74 | 26 | 6 |
| 35 | 4 | 5 | 95 | 6 |
| 36 | 4 | 5 | 95 | 6 |
| 38 | 4 | 99 | 1 | 6 |
| 45 | 4 | 99 | 1 | 1 |

### HPLC Method 5:

| Time | Flow (ml/min) | % A | % B | Curve |
|---|---|---|---|---|
| Initial | | 80 | 20 | |
| 2 | 1 | 80 | 20 | 1 |
| 22 | 1 | 45 | 55 | 6 |
| 25 | 1 | 5 | 95 | 6 |
| 25.5 | 1 | 5 | 95 | 6 |
| 26 | 1 | 85 | 20 | 6 |
| 30 | 1 | 85 | 20 | 1 |

[1997] ONT-60: Oligonucleotide 149 All-(Rp)-d[5mCs8As8Gs8Ts85mCs8Ts8Gs85mCs8Ts8Ts85mCs8G] (SEQ ID NO: 125)

[chemical structure]

[1998] The oligonucleotide was synthesized as described above. RT in RP-HPLC (HPLC method 5): 15.80 min. UPLC/ESI-MS: Calcd: 6345.6; Found: 6340.7.

ONT-69: All-(Su)-d[5mCs16As8Gs8Ts85mCs8Ts8Gs85mCs8Ts8Ts85mCs8G] (SEQ ID NO: 125)

[1999] The oligonucleotide was synthesized as described above. RT in RP-HPLC (HPLC method 5): 18.61 min. UPLC/ESI-MS: Calcd: 6345.6; Found: 6340.6.

### Example 85

[2000] The P-modified blockmer and altmer oligonucleotides containing both stereodefined phosphorothioate diester and stereodefined morpholinoethyl phosphorothioate triester internucleotidic linkages were synthesized on an ABI-394 DNA/RNA synthesizer according to the cycle summarized in Table E-4 using 1 μmol synthesis column and 1.7 μmol of oxalyl linked dG^{CE,Pac} on HCP. Either stereodefined P-modified phosphorothioate linkage was introduced at predetermined positions within the sequence by performing either sulfurization step (1) or (2). The synthesis cycle was performed with removal of the terminal 5′-O-DMTr group (DMT Off). The solid support was washed with dry ACN and dried under a flux of argon. The dry HCP was placed in a plastic vial and was treated with 1 mL of dry propylamine in dry pyridine (in a 1:4 ratio) for a period of 18 h at r.t. The solvents were then evaporated and the residue was re-suspended in DMSO and the HCP support was filtered off. The crude product was purified by reverse phase preparative HPLC. The fractions having purity above 95% were pooled, concentrated and desalted by reverse-phase HPLC (Gradient of 0 to 80% ACN). The final desalted product was lyophilized from water.

TABLE E-4
Summary for Oligonucleotide Synthesis on a DNA/RNA Synthesizer ABI-394
Used for the Synthesis of Example 85.

| | | | delivery time | |
|---|---|---|---|---|
| step | reaction | reagent | (sec) | wait time (sec) |
| 1 | detritylation | 3% TCA in DCM | 3 + 60 + 10 | N.A. |
| 2 | coupling | 0.15M phosphoramidite in | 5 + 4 | 30 + 600 |
| | | ACN + 1.2M CMPT in ACN | | |
| 3 | capping 1 | 5% Pac₂O in THF/2,6-lutidine | 20 | 60 |
| 4 | capping 2 | 5% Pac₂O in THF/2,6-lutidine + | 20 | 60 |
| | | 16% NMI in THF | | |
| 5 | sulfurization | 0.3M S-Morpholinoethyl p- | 10 + 4 × 2 | 300 + 3 × 150 + |
| | | Chlorophenyl thiosulfonate | | 600 |
| | | [chemical structure] in ACN/BSTFA | | |
| 6 | sulfurization | 0.3M S-cyanoethyl | 10 + 4 × 2 | 300 + 3 × 150 + |
| | | Methylthiosulfonate | | 600 |
| | | [chemical structure] in ACN/BSTFA | | |

### Example 86. General Purification Method for Example 85

[2001] Buffer A: 20 mM Phosphate pH=6.0 (adjusted with phosphoric acid)

### Buffer B: ACN

### Column: XBridge Prep Cis, 5 μm, Cis, 250×10 mm, Part #186003256

[2002] Buffer heater set temperature=50° C.
Signal monitored at 254 and 280 nm

### Gradient Used:

| Time | Flow (ml/min) | % A | % B | Curve |
|---|---|---|---|---|
| Initial | | 99 | 1 | |
| 5 | 4 | 99 | 1 | 1 |
| 10 | 4 | 77 | 23 | 6 |
| 60 | 4 | 70 | 30 | 6 |
| 65 | 4 | 20 | 80 | 6 |
| 70 | 4 | 20 | 80 | 6 |
| 71 | 4 | 99 | 1 | 6 |
| 80 | 4 | 99 | 1 | 1 |

### HPLC Method 6

[2004] Buffer A: 20 mM Ammonium acetate, pH 6.0

### Buffer B: ACN

### Column: XBridge C₈, 3.5 μm, 4.6×150 mm, Part #186003034

[2005] Buffer heater set temperature=60° C.
Signal monitored at 254 and 280 nm

### Gradient Used:

| Time | Flow (ml/min) | % A | % B | Curve |
|---|---|---|---|---|
| Initial | | 90 | 10 | |
| 2 | 1 | 90 | 10 | 1 |
| 22 | 1 | 75 | 25 | 6 |
| 25 | 1 | 5 | 95 | 6 |
| 25 | 1 | 5 | 95 | 6 |
| 25.5 | 1 | 90 | 10 | 6 |
| 30 | 1 | 90 | 10 | 1 |

### ONT-71: All-(Rp)-d[5mCs1As1GsTs5mCsTsGs5mCsTsTs15mCs1G] (SEQ ID NO: 125)

[2007] The oligonucleotide was synthesized as described above. RT in RP-HPLC (HPLC method 6): 9.39 min. UPLC/ESI-MS: Calcd: 4297.9; Found: 4295.3

### ONT-72: All-(Sp)-d[5mCs1As1GsTs5mCsTsGs5mCsTsTs15mCs1G] (SEQ ID NO: 125)

[2008] The oligonucleotide was synthesized as described above. RT in RP-HPLC (HPLC method 6): 10.84 min. UPLC/ESI-MS: Calcd: 4297.9; Found: 4295.7

### ONT-73: All-(Rp)-d[5mCs1AsGs1Ts5mCs1TsGs15mCsTs1Ts5mCs1G] (SEQ ID NO: 125)

[2009] The oligonucleotide was synthesized as described above. RT in RP-HPLC (HPLC method 6): 13.54 min. UPLC/ESI-MS: Calcd: 4524.2; Found: 4522.6

### ONT-74: All-(Sp)-d[5mCs1AsGs1Ts5mCs1TsGs15mCsTs1Ts5mCs1G] (SEQ ID NO: 125)

[2010] The oligonucleotide was synthesized as described above. RT in RP-HPLC (HPLC method 6): 15.52 min. UPLC/ESI-MS: Calcd: 4524.2; Found: 4521.0

[2011] Prodrug oligonucleotide properties such as: nuclease resistance, tissue accumulation, cell penetration, endosomal escape, immunostimulation, duration of action, pharmacokinetics, etc. are all modulated and influenced by the stereochemistry of the chiral phosphorothioate backbone linkages.

[2012] RNA oligonucleotides containing 2′-OH, 2′-OMe, 2′-F, 2′-deoxy, internucleotidic phosphodiester or internucleotidic stereodefined phosphorothioate diester or internucleotidic stereodefined phosphorothioate triester (ProDrug) (either releasing a internucleotidic phosphodiester (PO) or a internucleotidic stereodefined phosphorothioate diester (PS)) linkages are synthesized on ABI 394 DNA/RNA synthesizer according to the cycles summarized in Table E-35, Table E-36, Table E-37 and Table E-38, using a 10 μmol capacity synthesis column loaded with 130 mg (4.9 μmol) of oxalyl linked 5′-O-DMTr-2′-deoxythymidine prepared as previously described. Prior to synthesis, a preliminary capping step (capping 2) is performed and the synthesis is terminated with removal of the terminal 5′-O-DMTr groups. The oxidation step is performed using a commercially available 5-6 M solution of tert-butyl hydroperoxide (TBHP) in decane which was then diluted with four parts dichloromethane. The stereospecific sulfurization step for internucleotidic stereodefined phosphorothioate diester linkage is performed using the 0.3 M S-cyanoethylmethylthiosulfonate reagent following the coupling of the corresponding chiral phosphoramide and the two-step capping process (Table E-36). The stereospecific sulfurization step for internucleotidic stereodefined phosphorothioate triester releasing a stereodefined internucleotidic phosphodiester (PS) linkage is performed using the 0.3 M S—(N-morpholinoethylthioester-ethyl)-para-nitro-toluylthiosulfonate reagent following the coupling of the corresponding chiral phosphoramide and the two-step capping process (Table E-37). The stereospecific sulfurization step for internucleotidic stereodefined phosphorothioate triester releasing an internucleotidic phosphodiester (PO) linkage is performed using the 0.3 M S—(N-morpholinoethyl)-toluylthiosulfonate reagent following the coupling of the corresponding chiral phosphoramide and the two-step capping process (Table E-38). For 2′-OH RNA nucleotides, 2′-O-base protecting groups are used, such as 2′-O-PivOM (Debart et al., Chem. Eur. J., 2008, 14, 9135) or 2′-O-TC (Dellinger et al., J. Am. Chem. Soc., 2011, 133, 11540). Ultra-mild (C-Ac, G-Pac, A-Pac) protecting groups are used for all of the nucleobases.

[2013] Once the automated oligonucleotide synthesis cycle is completed and the final 5′-0-DMTr group is removed, the synthesis column is taken off the DNA/RNA synthesizer and dried under vacuum. 10 mL solution of 0.5 M 1,5-diazabicyclo[4.3.0]non-5-ene (DBN), 0.25 M N,O-bis(trimethylsilyl)trifluoroacetamide (BSTFA) in ACN is continuously added to the support through the synthesis column for 1 min without stopping the flow using a syringe attached to one end of the synthesis column. The support is then washed with anhydrous ACN and dried under vacuum. Then, the dried support is transferred into an empty screw-cap plastic vial and treated with 10% n-PrNH₂ solution in anhydrous pyridine (1.5 mL) at room temperature for 12 h. After that, the solvents are evaporated to dryness and the residue including the solid support is dissolved in 2 mL of water/DMSO (50/50) at pH 5, the support is filtered off and the filtrates are collected, immediately frozen and stored at −80° C. prior to purification.

TABLE E-35
Summary for Oligonucleotide Synthesis
on a DNA/RNA Synthesizer ABI 394

| | | | delivery | wait |
|---|---|---|---|---|
| step | reaction | reagent | time (sec) | time (sec) |
| 1 | detritylation | 3% TCA in DCM | 3 + 120 + 10 | N. A. |
| 2 | coupling | 0.15M | 7 + 6 | 30 + 600 |
| | | phosphoramidite in | | |
| | | ACN + 2M CMPT in | | |
| | | ACN | | |
| 3 | capping | 5% Pac₂O in THF/2,6- | 10 | 20 |
| | | lutidine + 16% NMI in | | |
| | | THF | | |
| 4 | oxidation | 1.1M tert-butyl | 20 | 110 |
| | | hydroperoxide in 4:1 | | |
| | | dichloromethane:decane | | |

TABLE E-36
Summary for Oligonucleotide Synthesis on a DNA/RNA Synthesizer ABI 394

| step | reaction | reagent | delivery time (sec) | wait time (sec) |
|---|---|---|---|---|
| 1 | detritylation | 3% TCA in DCM | 3 + 120 + 10 | N.A. |
| 2 | coupling | 0.15M chiral | 8 + 6 | 30 + 900 (2′-OMe |
| | | phosphoramidite in | | RNA) |
| | | ACN + 2M CMPT in | | 30 + 600 (DNA) |
| | | ACN | | |
| 3 | capping 1 | 5% Pac₂O in THF/2,6- | 30 | 60 |
| | | lutidine | | |
| 4 | capping 2 | 5% Pac₂O in THF/2,6- | 30 | 60 |
| | | lutidine + 16% NMI in | | |
| | | THF | | |
| 5 | sulfurization | 0.3M S-(2-cyanoethyl) | 15 + 3 × 4 | 120 + 3 × 60 + 300 |
| | | methylthiosulfonate | | |
| | | [chemical structure] in ACN/BSTFA | | |

TABLE E-37
Summary for Oligonucleotide Synthesis on a DNA/RNA Synthesizer ABI-394.

| | | | delivery time | |
|---|---|---|---|---|
| step | reaction | reagent | (sec) | wait time (sec) |
| 1 | detritylation | 3% TCA in DCM | 3 + 60 + 10 | N.A. |
| 2 | coupling | 0.15M phosphoramidite in | 5 + 4 | 30 + 600 |
| | | ACN + 1.2M CMPT in | | |
| | | ACN | | |
| 3 | capping 1 | 5% Pac₂O in THF/2,6- | 20 | 60 |
| | | lutidine | | |
| 4 | capping 2 | 5% Pac₂O in THF/2,6- | 20 | 60 |
| | | lutidine + 16% NMI in | | |
| | | THF | | |
| 5 | sulfurization | 0.3M S-(N- | 10 + 4 × 2 | 300 + 3 × 150 + |
| | | morpholinothioester-ethyl- | | 600 |
| | | p-nitro-toluylthiosulfonate | | |
| | | [chemical structure] in ACN/BSTFA | | |

TABLE E-38
Summary for Oligonucleotide Synthesis on a DNA/RNA Synthesizer ABI-394.

| | | | delivery time | |
|---|---|---|---|---|
| step | reaction | reagent | (sec) | wait time (sec) |
| 1 | detritylation | 3% TCA in DCM | 3 + 60 + 10 | N.A. |
| 2 | coupling | 0.15M phosphoramidite in | 5 + 4 | 30 + 600 |
| | | ACN + 1.2M CMPT in ACN | | |
| 3 | capping 1 | 5% Pac₂O in THF/2,6-lutidine | 20 | 60 |
| 4 | capping 2 | 5% Pac₂O in THF/2,6-lutidine + | 20 | 60 |
| | | 16% NMI in THF | | |
| 5 | sulfurization | 0.3M S-Morpholinoethyl | 10 + 4 × 2 | 300 + 3 × 150 + |
| | | Toluylthiosulfonate | | 600 |
| | | [chemical structure] in ACN/BSTFA | | |

[chemical structure]

[2014] Synthesis of Oligonucleotide: (Rp)-uucuAGAccuGuuuuGcuudTs10dT (SEQ ID NO: 121)

[2015] Synthesis of Oligonucleotide ONT-107: (Sp)-uucuAGAccuGuuuuGcuudTs10dT (SEQ ID NO: 121)

[2016] Synthesis of Oligonucleotide ONT-108: (Rp)-AAGcAAAAcAGGUCuAGAAdTs10dT (SEQ ID NO: 122)

[2017] Synthesis of Oligonucleotide ONT-109: (Sp)-AAGcAAAAcAGGUCuAGAAdTs10dT SEQ ID NO: 122)

[chemical structure]

[2018] Synthesis of Oligonucleotide: (Rp, Rp)-as1AGcAAAAcAGGUCuAGAAdTsdT (SEQ ID NO: 122)

[2019] Synthesis of Oligonucleotide: (Sp, Rp)-as1GcAAAAcAGGUCuAGAAdTsdT (SEQ ID NO: 123)

[2020] Synthesis of Oligonucleotide: (Sp, Sp)-as1GcAAAAcAGGUCuAGAAdTsdT (SEQ ID NO: 123)

[2021] Synthesis of Oligonucleotide: (Rp, Sp)-as1GcAAAAcAGGUCuAGAAdTsdT (SEQ ID NO: 123)

[2022] Synthesis of Oligonucleotide: (All (Sp))-us1ucus1AGAccs1uGus1uus1uGcuudTs10dT (SEQ ID NO: 121)

[2023] Synthesis of Oligonucleotide: (All (Rp))-As10AGcAAAAcAGGs1UCuAs1GAs1AdTs10dT (SEQ ID NO: 122)

[2024] RNA strand thermal annealing and preparation of siRNA duplexes. Each RNA strand is mixed with its complementary RNA strand in equimolar concentration of 10 μM in 1×PBS. Total 0.5 mL solution is prepared for each duplex and the mixture is heated at 90° C. for 2 min and is allowed to cool down over the course of several hours. The mixtures are then stored at 4° C.

[2025] Following the thermal RNA strand annealing step, all the possible siRNA duplex combinations are prepared by annealing any of the Sense strands with any possible complementary strand of the Antisense strands.

[2026] All prepared siRNA duplexes are evaluated in vitro for their PCSK9 gene-silencing properties, following transfection in HeLa cells or Hep3B cells.

[2027] All prepared siRNA duplexes with ProDrug groups are evaluated in vitro for their PCSK9 gene-silencing properties, following free uptake in Hep3B cells, Huh-7 cells or human primary hepatocytes.

[2028] Different potenties are observed, modulated by the number, the position and the stereo architecture of the chiral phosphorothioate backbone linkages, combined with the layers of additional chemical modifications and ProDrug groups explored.

[2029] siRNA properties such as: nuclease resistance, cell penetration, endosomal escape, duplex thermodynamic stability, tridimensional structure of the duplex, affinity towards the various mechanistic steps of enzyme interactions, affinity towards the target mRNA, specific off-target effects, immunestimulation, duration of action, pharmacokinetics, etc. are all modulated and influenced by the stereochemistry of the chiral phosphorothioate backbone linkages as well as the presence or the absence of the ProDrug group.

[2030] The attachment of PO and PS releasing ProDrug groups to the siRNA duplexes enhances their intracellular delivery and free uptake in the absence of transfection reagent or targeting ligand.

### Example 87: Stability Studies of Diastereomerically Pure Oligonucleotides

[2031] The present Example compares the in vitro stability of chirally pure oligonucleotides with that observed for the “parent” stereorandom mixture (i.e., for a composition containing oligonucleotides of the same sequence as the chirally pure oligonucleotides but not displaying chiral purity, for example as a result of having been prepared via a stereorandom process). Seven chirally pure oligonucleotides, each of which had a sequence complementary to that of a particular target transcript or gene encoding a protein of interest were synthesized, formulated, and assessed for metabolic stability using three different biological matrices: snake venom phosphodiesterase (svPDE), nuclease P1 (nP1) and rat whole liver homogenates. Levels of full-length oligonucleotide were quantified by IEX-HPLC after different incubation periods. The results presented in this Example demonstrate, for instance, that chirally pure oligonucleotide compositions can have significantly different metabolic stability as compared with an appropriate reference (e.g., a preparation of oligonucleotides of the same sequence but different chiral specificity, including particularly stereorandom preparations), and specifically as compared with a “parental” stereorandom preparation. In this Example, oligonucleotides having a sequence antisense to (and therefore targeting) human Apolipoprotein-B (ApoB) were used for proof-of-concept in metabolic stability studies.

Snake Venom Phosphodiesterase (svPDE) Digestion Study for Oligonucleotides ONT-75, ONT-77, ONT-80, ONT-81, ONT-87, ONT-88, ONT-89 and ONT-41

[2032] We used the protocol reported by Oka et al. (J. Am. Chem. Soc. 2008, 130, 16031-16037) with minor modifications. Purified oligonucleotide (10 nmoles) in water (50 μL) was added to the aqueous solution (450 μL, pH 8.6) containing svPDE (4×10⁻³ units), 100 mM Tris-HCI and 15 mM MgCl₂. The mixture was incubated at 37° C. with shaking at 400 rpm. A 50 μL aliquot was taken at each time point (0 h, 12 h, 1 d, 2 d, 3 d, 4 d, 5 d, 6 d and 7 d) and was quenched with 25 μL of 150 mM EDTA, 2 μL of Proteinase K solution (20 mg/mL) and 30 μL of Lysis buffer (Qiagen, #129115) and the mixture was heated at 60° C. for 20 min. 5 μL of internal standard (5′-GCGTTTGCTCTCTTCTTGCGTIT1Tr-3′ (SEQ ID NO: 126), a 27-mer oligonucleotide (underlined nucleotides are 2′-MOE modified), (200 μM) was added to the aliquot. Quantification analyses were performed by IEX-HPLC and metabolite identification was carried out by UPLC/MS. The results were illustrated in FIG. 59.

[2033] IEX-HPLC analysis showed degradation of phosphorothioate 20-mer during incubation with svPDE with no significant difference between stereoisomers. LCMS analysis of metabolites revealed that the majority of the degradation products were formed as a result of desulfurization. As reported previously by Prakash et al. (Biochemistry 2002, 41, 11642-11648), Prhavc et al. (Org. Lett., 2003, S, 2017-2020) and others, we also observed that 2′-MOE modifications at 5′ and 3′-ends protect these oligomers from svPDE digestion which is a 3′-5′ exonuclease.

Nuclease P1 (nP1) Digestion Study for Oligonucleotides ONT-75, ONT-77, ONT-80, ONT-81, ONT-87, ONT-88, ONT-89 and ONT-41

[2034] We employed the protocol reported by Oka et al. (J. Am. Chem. Soc. 2008, 130, 16031-16037) with minor modifications. Purified oligonucleotide (10 nmoles) in Water (50 μL) was added to an aqueous solution (500 μL, pH 7.2) containing nP1 (20 units), 100 mM Tris-HCI and 1 mM ZnCl₂. The mixture was incubated at 37° C. with shaking at 400 rpm. A 50 μL aliquot was taken at each time point (0 h, 1 h, 2 h, 4 h, 8 h, 12 h, 1 d, 2 d,) and was quenched with 25 μL of stop buffer (150 mM EDTA, 2 μL of Proteinase K solution (20 mg/mL) and 30 μL of Lysis buffer (Qiagen, #129115) and the mixture was heated at 60° C. for 20 min. 5 μL of internal standard (5′-GCGTTTGCTCTTCTTCTTGCGTTTTTT-3′ (SEQ ID NO: 126)), a 27-mer oligonucleotide (underlined nucleotides are 2′-MOE modified) (200 μM) was added to the aliquot. Quantification analyses were performed by IEX-HPLC and metabolite identification was carried out by UPLC/MS. The results were illustrated in FIGS. 60-67.

[2035] Nuclease nP1 has previously been reported to specifically cleave DNA phosphorothioate linkages having an (Sp) absolute configuration at the phosphorus atoms (Porter et al., Biochemistry, 1983, 22, 1369-1377; Oka et al., J. Am. Chem. Soc., 2008, 130, 16031-16037). We observed a similar pattern of cleavage for the 5-10-5 2′-MOE gapmer phosphorothioate oligonucleotides studied, where nP1 was found to digest efficiently the DNA core of the gapmer oligonucleotides at the (Sp) phosphorothioate centers, without affecting the 2′-MOE wings, which were stable independent of stereochemistry. The complete digestion of the DNA core was observed in one hour for the stereorandom diastereomixture oligonucleotide ONT-41, as well as for the stereopure oligonucleotides containing (Sp)-phosphorothioate internucleotidic linkages in the DNA core (ONT-77, ONT-80, ONT-87, ONT-88 and ONT-89). All products of cleavage were clearly identified by UPLC/MS. As previously reported in the literature, we found that (Rp) phosphorothioate DNA was clearly not a substrate for nP1. The two chirally pure oligonucleotides having (Rp) phosphorothioate DNA cores (ONT-75 and ONT-81) were completely stable to nP1 for an incubation period of 1 h at 37° C. ONT-75 and ONT-81 showed c.a. 10-15% loss of the full length products during the course of incubation over several days. The results presented in this Example demonstrate, for instance, that chirally pure oligonucleotide compositions can have significantly different metabolic stability in an nP1 assay as compared with an appropriate reference (e.g., a preparation of oligonucleotides of the same sequence but different chiral specificity, including particularly stereorandom preparations), and specifically as compared with a “parental” stereorandom preparation.

### General IEX-HPLC Method for the Analysis of Enzyme Digestion Products

### Buffer A: 10 mM TrisHCl, 50% ACN, pH 8.0

### Buffer B: 10 mM TrisHCl, 800 mM NaClO₄, 50% ACN, pH 8.0

### Column: DIONEX, DNAPac, PA-100, 4.0×250 mm, Part #063000

[2036] Column temperature=60° C.
Signal monitored at 254 and 280 nm

### Gradient Used:

| Time (min) | Flow (mL/min) | % A | % B | Curve |
|---|---|---|---|---|
| Initial | | 95 | 5 | |
| 2 | 1 | 95 | 5 | 1 |
| 3 | 1 | 75 | 25 | 6 |
| 10 | 1 | 35 | 65 | 6 |
| 10.1 | 1 | 95 | 5 | 6 |
| 12.5 | 1 | 95 | 5 | 1 |

### General UPLC-LCMS Method for the Analysis of Enzyme Digestion Products.

### Buffer A: 15 mM TEA, 400 mM HFIP, Water

### Buffer B: 50:50 Buffer A/Methanol

### Column: UPLC@OST C₁ₛ 1.7 μm, 2.1×500 mm

[2038] Column temperature=60° C.

### Gradient Used:

| Time (min) | Flow (mL/min) | % A | % B | Curve |
|---|---|---|---|---|
| Initial | 0.2 | 70 | 30 | |
| 2 | 0.2 | 70 | 30 | 1 |
| 27 | 0.2 | 35 | 65 | 6 |
| 27.5 | 0.2 | 5 | 95 | 6 |
| 28.5 | 0.2 | 5 | 95 | 6 |
| 29 | 0.2 | 70 | 30 | 6 |
| 30 | 0.2 | 70 | 30 | 1 |

### In Vitro Metabolic Stabilities of Human Diastereomerically Pure Oligonucleotides in Preincubated Rat Whole Liver Homogenates

[2040] The metabolic stability of chirally pure oligonucleotides in in vitro rat whole liver homogenates was measured. The protocol employed here has previously been reported and used to evaluate the stability of oligonucleotide drugs.

[2041] Protocol: The protocol reported by Geary et al was employed in the current study (Oligonucleotides, 2010, 20, 309) with some modifications.

[2042] Test system: Two male Sprague-Dawley rats (Rattus norvegicus) were supplied by Charles River Laboratories, Inc., (Hollister, CA).

[2043] Tissue Collection: Animals were acclimated to the study room for two days prior to tissue collection. At the time of tissue collection, animals were anesthetized with an intraperitoneal (IP) injection of sodium pentobarbital solution. Liver perfusion was performed using 500 mL of chilled saline/animal, administered via the hepatic portal vein. After perfusion, the livers were dissected and maintained on ice. Livers were minced into small pieces then weighed.

[2044] Liver Homogenate Preparation: The minced pieces of liver tissues were transferred to tared 50 mL centrifuge tubes and weighed. Chilled homogenization buffer (100 mM Tris pH 8.0, 1 mM magnesium acetate, with antibiotic-antimycotic agents) was added to each tube, such that the tube(s) contained 5 mL of buffer per gram of tissue. Using a QIAGEN TissueRuptor tissue homogenizer, the liver/buffer mixture was homogenized while maintaining the tube on ice. The protein concentration of the liver homogenate was determined using a Pierce BCA protein assay. Liver homogenates were divided into 1 mL aliquots, transferred to cryovials and stored at −60° C.

[2045] Incubation Conditions: 1 mL aliquots of frozen liver homogenate (protein concentration=31.9 mg/mL) were thawed and incubated at 37° C. for 24 h. Six eppendorf tubes (2 mL) were taken and 450 μL of homogenate was added in each tube. 50 μL of test oligonucleotide (200 μM) was added to each tube. Immediately after mixing, 125 μL of (5×) stop buffer (2.5% IGEPAL, 0.5 M NaCl, 5 mM EDTA, 50 mM Tris, pH=8.0) and 12.5 μL of 20 mg/mL Proteinase K (Ambion, #AM2546) was added to one tube for a 0 hour time point. The mixture was then heated at 60° C. for one hour. The remaining reaction mixtures were incubated at 37° C. with shaking at 400 rpm on a VWR Incubating Microplate shaker. After incubation for a designated period (1, 2, 3, 4, and 5 days), each mixture was treated with 125 μL of (5×) stop buffer (2.5% IGEPAL, 0.5 M NaCl, 5 mM EDTA, 50 mM Tris, pH=8.0) and 12.5 μL of 20 mg/mL Proteinase K (Ambion, #AM2546).

[2046] Work up and Bioanalysis: (5′-GCGTTTGCTCTTCTTCTTGCGTTTTTT-3′ (SEQ ID NO: 126)), a 27-mer oligonucleotide (underlined nucleotides are 2′-MOE modified) was used as the internal standard for quantitation of diastereomerically pure oligonucleotides. 50 μL of internal standard (200 μM) was added to each tube followed by addition of 250 μL of 30% ammonium hydroxide, 800 μL of Phenol: Chloroform: isoamyl alcohol (25:24:1). After mixing and centrifugation at 600 rpm, the aqueous layer was evaporated on speed vac to 100 μL and loaded on a Sep Pak column (C18, 1 g, WAT 036905). All the aqueous washings of the Sep pak column were tested with quick IEX-HPLC method to ensure that no product was found there. The acetonitrile eluate was concentrated to dryness and dissolved in 100 μL water and analyzed using RP-HPLC.

Eluant A=10 mM Tributylammonium acetate, pH=7.0

### Eluant B=ACN

[2047] Column: XTerra MS Cis, 3.5 μm., 4.6×150 mm, Part number: 186000432

### Column Temperature=60° C.

### HPLC Gradient:

| | Time | Flow | % A | % B | Curve |
|---|---|---|---|---|---|
| 1 | | 1.0 | 65 | 35 | |
| 2 | 5.0 | 1.0 | 65 | 35 | 1 |
| 3 | 30.0 | 1.0 | 40 | 60 | 6 |
| 4 | 35.0 | 1.0 | 5 | 90 | 6 |
| 5 | 36.0 | 1.0 | 65 | 35 | 6 |
| 6 | 40.0 | 1.0 | 65 | 35 | 1 |

[2049] FIG. 68 shows that different chirally pure oligonucleotides have different metabolic stability profiles in rat whole liver homogenate. The experiment also demonstrates that the diastereoisomeric mixture ONT-41 has a different metabolic stability profile compared with diastereomerically pure stereodefined oligonucleotides with the same sequence and chemical composition (ONT-75 and ONT-77 are used here as examples, but this observation, as appreciated by a person of ordinary skill in the art, may be extrapolated to other possible diastereomerically pure stereodefined phosphorothioate diastereoisomers of this molecule).

[2050] The oligonucleotide ONT-75, having a stereocontrolled phosphorothioate backbone with full Rp absolute configuration at all phosphorus atoms was degraded completely in one day in preincubated rat whole liver homogenates at 37° C., demonstrating the lowest metabolic stability of the three used in the study.

[2051] The other diastereomerically pure stereodefined phosphorothioate oligonucleotide ONT-77 (having absolute configuration: 5R-10S-4R) was more than two-fold more stable than the stereorandom ONT-41 (Mipomersen). After incubation for 5 days 40% of full length oligonucleotide remained for the diastereomerically pure ONT-77 vs. approximately 15% of full length oligonucleotide for the stereorandom ONT-41 (Mipomersen). A direct comparison between ONT-77 and ONT-41 clearly demonstrated a significantly higher metabolic stability for the stereocontrolled isomer 5R-10S-4R (ONT-77), throughout all of the analyzed time points. The stereodefined architecture of the diastereomerically pure isomer ONT-77 clearly affects the rate of degradation and the overall metabolic stability of this oligonucleotide. These observations lead to the conclusion, without the intention to be limited by theory, that the Sp stereochemistry applied to the DNA core of the 5-10-5 gapmer oligonucleotide provides enhanced endonuclease resistance and hence enhanced metabolic stability compared with the stereorandom diastereomixture. Some other stereo architectures used for other diastereomerically pure stereocontrolled phosphorothioate isomers of this sequence would be expected to show even higher metabolic stability in this experiment.

[2052] While not wishing to be limited by theory, the results presented in this Example demonstrate, for instance, that Rp stereochemistry at the phosphorothioate linkage (ONT-75) is less metabolically stable in rat liver homogenates than ONT-77, which contains the Sp DNA core. The results presented in this Example also demonstrate, for instance, that chirally pure oligonucleotide compositions can have significantly different metabolic stability in rat liver homogenate as compared with an appropriate reference (e.g., a preparation of oligonucleotides of the same sequence but different chiral specificity, including particularly stereorandom preparations), and specifically as compared with a “parental” stereorandom preparation. In this Example, oligonucleotides having a sequence antisense to (and therefore targeting) human Apolipoprotein-B (ApoB) were used for proof-of-concept in metabolic stability studies. A provided chirally controlled oligonucleotides may have increased or decreased stability towards endogenous enzymes. By providing chirally controlled oligonucleotide and compositions and methods thereof, the present invention provided oligonucleotides and compositions that have enhanced pharmacological properties than known chirally uncontrolled oligonucleotides and their compositions.

In Vitro Metabolic Stabilities of Human PCSK9 siRNA Duplexes Having Stereocontrolled Phosphorothioate Diester Linkages in Human Serum.

[2053] A protocol similar to previously reported procedures (Oka et al., J. Am. Chem. Soc. 2008, 130, 16031-16037) is used. siRNA duplexes (2.5 μmoles) in water (50 μL) are added to human serum (450 μL). The mixture is incubated at 37° C. with shaking at 400 rpm. 50 μL aliquots are taken out at each time point (0 h, 0.5 h, 1 h, 2 h, 4 h, 6 h, 8 h and 24 h) and are quenched with 25 μL of 150 mM EDTA, 2 μL of Proteinase K solution (20 mg/mL) and 30 μL of Lysis buffer (Qiagen, #129115) and the mixture is heated at 60° C. for 20 min. 5 μL of Internal standard (5′-GCGTTTGCTCTTCTTCTTGCGTTTTTT′-3′ (SEQ ID NO: 126), a 27-mer oligonucleotide (underlined nucleotides are 2′-MOE modified) (200 μM) is added to the aliquot. Quantification analyses are performed by IEX-HPLC and metabolite identification is carried out by UPLC/MS.

[2054] In some embodiments, the siRNA duplexes having a 3′ terminal diastereomerically pure phosphorothioate with the Sp configuration show higher metabolic stability in human serum compared to the siRNAs having the phosphorothioate with the Rp configuration, or the stereorandom diastereomixture, at the same position. In other embodiments, the siRNA duplexes having a 5′ terminal diastereomerically pure phosphorothioate with the Sp configuration show higher metabolic stability in human serum compared to the siRNAs having the phosphorothioate with the Rp configuration, or the stereorandom diastereomixture, at the same position. In other embodiments, siRNA duplexes having diastereomerically pure phosphorothioates with the Sp configuration at both the 3′ and the 5′ extremities show higher metabolic stability in human serum compared to the siRNAs having the phosphorothioate with the Rp configuration, or the stereorandom diastereomixtures, at the same positions. In other embodiments, siRNA duplexes having multiple diastereomerically pure phosphorothioates with the Sp configuration show higher metabolic stability in human serum compared to the siRNAs having multiple phosphorothioates with the Rp configuration, or the stereorandom diastereomixtures. In other embodiments, siRNA duplexes having full backbone of diastereomerically pure phosphorothioates with the Sp configuration show higher metabolic stability in human serum compared to the siRNAs having the full backbone of phosphorothioates with the Rp configuration, or the stereorandom diastereomixtures.

### Example 88. Chirally Controlled Oligonucleotide Compositions Show Different Potency In Vitro as Compared with Chirally Uncontrolled Compositions Having the Same Sequence

[2055] The present Example compares in vitro pharmacological activity of chirally pure oligonucleotides with that observed for the “parent” stereorandom mixture (i.e., for a composition containing oligonucleotides of the same sequence as the chirally pure oligonucleotides but not displaying chiral purity, for example as a result of having been prepared via a stereorandom process). Four chirally pure oligonucleotides, each of which had a sequence complementary to that of a particular target transcript or gene encoding a protein of interest were synthesized, formulated, and transfected into primary mouse hepatocytes. mRNA levels were quantified to assess level of suppression. In this Example, oligonucleotides having a sequence antisense to (and therefore targeting) human Apolipoprotein-B (ApoB) were used for proof-of-concept in transgenic mice expressing human ApoB.

Transfection of Mouse Primary Hepatocytes with Oligonucleotides

[2056] C57BL6 male mice, 7 weeks of age were used to extract and plate mouse primary hepatocytes in 96-well plates (without overlay) (Celsis/Bioreclamation IVT). Transfection of primary hepatocytes was carried out with lipofectin (Life Technologies, cat. No. 18292-037) using the manufacturer's protocol, using 0.5 ul of Lipofectin per 96-plate well. Twelve, 1:3 siRNA duplex dilutions were created starting at 6 uM. 10 ul of 10× oligo was then lipoplexed with a prepared mixture of 9.5 ul of In vitro Gro HI Medium (Celsis Cat. Z99009) serum-free medium and 0.5 ul of Lipofectin per well. After a 10-15 minute incubation, 20 ul of lipoplexed oligo was added to primary hepatocytes in 80 ul of In vitro Gro HI Medium to bring the final volume to 100 ul per well. 24 hours after transfection, cells were lysed.

Apolipoprotein B mRNA Assay

[2057] Total mRNA was purified from cell lysates using MagMAX™-96 Total RNA Isolation Kit (Life Technologies, AM1830); 15 ul of cDNA was synthesized with High Capacity cDNA Reverse Transcription Kit with RNase Inhibitor (Life Technologies, 4374967). Gene expression was evaluated by Real-Time PCR on a Lightcycler 480 (Roche) using a Probes Master Mix (Roche. 04 707 494 001) according to manufacturer's protocol using the following primers:

### Mouse Apolipoprotein B Primers:

### [Template: (GenBank Accession Number M35186)]

forward primer:
(SEQ ID NO: 127)
CGTGGGCTCCAGCATTCTA
reverse primer:
(SEQ ID NO: 128)
AGTCATTTCTGCCTTTGCGTC
PCR probe:
(SEQ ID NO: 129)
FAM-CCAATGGTCGGGCACTGCTCAA-TAMRA

### Mouse GAPDH Primers:

forward primer:
(SEQ ID NO: 130)
GGCAAATTCAACGGCACAGT
reverse primer:
(SEQ ID NO: 131)
GGGTCTCGCTCCTGGAAGAT
PCR probe:
(SEQ ID NO: 132)
5′ JOE-AAGGCCGAGAATGGGAAGCTTGTCATC-TAMRA 3′

### Data Analysis

[2060] The delta delta Ct method was used to calculate values. For each sample, the mean ApoB signal was normalized to the mean GAPDH signal, and then normalized to the mean corresponding ratio for mock transfected and untreated samples, to obtain the relative level of ApoB protein expression. The “parent” stereorandom mixture was used for reference. A four-parameter linear regression curve was fitted to the data, and the bottom and top were constrained to a 0% and 100% constants respectively in order to calculate a relative IC50 using Graphpad Prism.

[2061] The in vitro dose-responses (FIGS. 71 and 72) show that the chirally pure oligonucleotides have significantly different potencies, with ONT-83 being the most potent, and ONT-84 and ONT-85 being the least potent, with a 8.6-fold difference in IC50s (Table E-39).

TABLE E-39
IC50 values of Stereoisomers (ONT-83, -84, -85 or -86)
for Suppression of Mouse Apolipoprotein B/GAPDH
mRNA Levels in Primary Mouse Hepatocytes

| | Bottom | Top | LogIC50 | Hill Slope | IC50 |
|---|---|---|---|---|---|
| ONT-83 | 0 | 100 | 1.6 | −0.4 | 35.8 |
| ONT-82 | 0 | 100 | 1.8 | −0.3 | 64.4 |
| ONT-85 | 0 | 100 | 2.5 | −0.3 | 308.0 |
| ONT-84 | 0 | 100 | 2.5 | −0.8 | 307.8 |
| ONT-86 | 0 | 100 | 1.7 | −0.6 | 51.2 |

[2062] The results presented in this Example demonstrate, for instance, that chirally pure oligonucleotide compositions can have significantly different pharmacological activity in vitro as compared with an appropriate reference (e.g., a preparation of oligonucleotides of the same sequence but different chiral specificity, including particularly stereorandom preparations), and specifically as compared with a “parental” stereorandom preparation. Those skilled in the art, in light of this demonstration, will appreciate that chirally controlled oligonucleotide compositions provided by the present disclosure have unexpected activities and characteristics.

### EQUIVALENTS

[2063] Having described some illustrative embodiments of the invention, it should be apparent to those skilled in the art that the foregoing is merely illustrative and not limiting, having been presented by way of example only. Numerous modifications and other illustrative embodiments are within the scope of one of ordinary skill in the art and are contemplated as falling within the scope of the invention. In particular, although many of the examples presented herein involve specific combinations of method acts or system elements, it should be understood that those acts and those elements may be combined in other ways to accomplish the same objectives. Acts, elements, and features discussed only in connection with one embodiment are not intended to be excluded from a similar role in other embodiments. Further, for the one or more means-plus-function limitations recited in the following claims, the means are not intended to be limited to the means disclosed herein for performing the recited function, but are intended to cover in scope any means, known now or later developed, for performing the recited function.

[2064] Use of ordinal terms such as “first”, “second”, “third”, etc., in the claims to modify a claim element does not by itself connote any priority, precedence, or order of one claim element over another or the temporal order in which acts of a method are performed, but are used merely as labels to distinguish one claim element having a certain name from another element having a same name (but for use of the ordinal term) to distinguish the claim elements. Similarly, use of a), b), etc., or i), ii), etc. does not by itself connote any priority, precedence, or order of steps in the claims. Similarly, the use of these terms in the specification does not by itself connote any required priority, precedence, or order.

[2065] The foregoing written specification is considered to be sufficient to enable one skilled in the art to practice the invention. The present invention is not to be limited in scope by examples provided, since the examples are intended as a single illustration of one aspect of the invention and other functionally equivalent embodiments are within the scope of the invention. Various modifications of the invention in addition to those shown and described herein will become apparent to those skilled in the art from the foregoing description and fall within the scope of the appended claims. The advantages and objects of the invention are not necessarily encompassed by each embodiment of the invention.

### APPENDIX (A)

| | | | | | SEQ |
|---|---|---|---|---|---|
| | | Gene | | | ID |
| Accession # | Unigene # | Symbol | Name | Sequence | NO: |
| NM_003467 | Hs.421986 | CXCR4 | Chemokine (C-X-C motif) | 5′-UAAAAUCUUCCUGCCCACCdTdT-3′ | 139 |
| | | | receptor 4 | | |
| NM_003467 | Hs.421986 | CXCR4 | Chemokine (C-X-C motif) | 5′-GGAAGCUGUUGGCUGAAAAdTdT-3′ | 140 |
| | | | receptor 4 | | |
| NM_006799.2 | Hs.72026 | PRSS21 | Protease, serine, 21 (testisin) | 5′-CACAUCCAGCCCAUCUGUC(dTdT)-3′ | 141 |
| NM_000117.1 | Hs.522823 | EMD | Emerin | 5′-CCGUGCUCCUGGGGCUGGG(dTdT)-3′ | 142 |
| NM_001350.3 | Hs.336916 | DAXX | Death-associated protein 6 | 5′-GGAGUUGGAUCUCUCAGAA(dTdT)-3′ | 143 |
| NM_003014.2 | Hs.105700 | SFRP4 | Secreted frizzled-related | 5′-AAGTCCCGCTCATTACAAATT-3′ | 144 |
| | | | protein 4 | | |
| NM_015062.3 | Hs.533551 | PPRC1 | Peroxisome proliferative | 5′-AAGACCAGCCUCUUUGCCCAG-3′ | 145 |
| | | | activated receptor, gamma, | | |
| | | | coactivator-related 1 | | |
| NM_001005360.1 | Hs.211463 | DNM2 | Dynamin 2 | 5′-GGACCAGGCAGAAAACGAG-3 | 146 |
| NM_001904.2 | Hs.476018 | CTNNB1 | Catenin (cadherin-associated | 5′-CUAUCAGGAUGACGCGG-3′ | 147 |
| | | | Protein), beta 1, 88 kDa | | |
| NM_153831.2 | Hs.395482 | PTK2 | PTK2 protein tyrosine kinase 2 | 5′-AACCACCUGGGCCAGUAUUAU-dTT-3′ | 148 |
| NM_001429.2 | Hs.517517 | EP300 | E1A binding protein p300 | 5′-UGACACAGGCAGGCUUGACUU-3′ | 149 |
| NM_005904.2 | Hs.465087 | SMAD7 | SMAD, mothers against DPP | 5′ AA GCU CAA UUC GGA CAA CAA | 150 |
| | | | homolog 7 (Drosophila) | G 3′ | |
| NM_001904.2 | Hs.476018 | CTNNB1 | Catenin (cadherin-associated | 5′ AAG UCC UGU AUG AGU GGG | 151 |
| | | | protein), beta 1, 88 kDa | AAC 3′ | |
| NM_175847.1 | Hs.172550 | PTBP1 | Polypyrimidine tract binding | 5′-TCG ACG AAC ATC TAC AAC GCC | 152 |
| | | | protein 1 | TGC TTC AAG AGA GCA GGC GTT | |
| | | | | GTA GAT GTT CTT TTT TT-3′ | |
| NM_175847.1 | Hs.172550 | PTBP1 | Polypyrimidine tract binding | 5′-TCG ACC AAT GAC AAG AGC CGT | 153 |
| | | | Protein 1 | GAC TTC AAG AGA GTC ACG GCT | |
| | | | | CTT GTC ATT GTT TTT TT-3′ | |
| NM_002659.2 | Hs.466871 | PLAUR | Plasminogen activator, | 5′-GGTGAAGAAGGGCGTCCAA-3′ | 154 |
| | | | urokinase receptor | | |
| NM_033360.2 | Hs.505033 | KRAS2 | V-Ki-ras2 Kirsten rat sarcoma | 5′GATCCGTTGGAGCTGTTGGCGTAGTTCA | 155 |
| | | | 2 viral oncogene homolog | AGAGACTACGCCAACAGCTCCAACTTTTTG | |
| | | | | GAAA-3′ | |
| NM_002959.4 | Hs.485195 | SORT1 | Sortilin 1 | 5′-AGGTGGTGTTAACAGCAGAG-3′ | 156 |
| NM_002959.4 | Hs.485195 | SORT1 | Sortilin 1 | 5′-AATGTTCCAATGCCCCACTC-3′ | 157 |
| NM_000743.2 | Hs.89605 | CHRNA3 | Cholinergic receptor, nicotinic, | 5′-AACUGCCAGUGGCCAGGGCCU-3′ | 158 |
| | | | alpha polypeptide 3 | | |
| NM_004859.2 | Hs.491351 | CLTC | Clathrin, heavy polypeptide | 5′-AACCUGCGGUCUGGAGUCAAC-3′ | 159 |
| | | | (Hc) | | |
| NM_004859.2 | Hs.491351 | CLTC | Clathrin, heavy polypeptide | 5′-UAAUCCAAUUCGAAGACCAAU-3′ | 160 |
| | | | (Hc) | | |
| NM_000038.3 | Hs.158932 | APC | Adenomatosis polyposis coli | 5′-AGGGGCAGCAACTGATGAAAA-3′ | 161 |
| NM_004850.3 | Hs.58617 | ROCK2 | Rho-associated, coiled-coil | 5′-AAGGCATCGCAGAAGGTTTAT-3′ | 162 |
| | | | containing protein kinase 2 | | |
| NM_001274.2 | Hs.24529 | CHEK1 | CHKl checkpoint homolog (S. | 5′-UCGAAGUACUCAGCGUAAG-3′ | 163 |
| | | | pombe) | | |
| NM_007194.3 | Hs.291363 | CHEK2 | CHK2 checkpoint homolog (S. | 5′-GAACCUGAGGACCAAGAAC-3′ | 164 |
| | | | pombe) | | |
| NM_001901.1 | Hs.410037 | CTGF | Connective tissue growth factor | 5′-AATGTTCTCTTCCAGGTCAGCCCTGT | 165 |
| | | | | CTC-3′ | |
| NM_001619.2 | Hs.83636 | ADRBK1 | Adrenergic, beta, receptor | 5′-AAGAAGUACGAGAAGCUGGAG-3′ | 166 |
| | | | kinase 1 | | |
| NM_005160.2 | Hs.517493 | ADRBK2 | Adrenergic, beta, receptor | 5′-AAGCAAGCUGUAGAACACGUA-3′ | 167 |
| | | | kinase 2 | | |
| NM_005308.2 | Hs.524625 | GRK5 | G protein-coupled receptor | 5′-AAGCCGUGCAAAGAACUCUUU-3′ | 168 |
| | | | kinase 5 | | |
| NM_001004106.1 | Hs.235116 | GRK6 | G protein-coupled receptor | 5-AACAGUAGGUUUGUAGUGAGC-3′ | 169 |
| | | | kinase 6 | | |
| NM_017556.1 | Hs.530101 | FBLP-1 | Filamin-binding LIM protein-1 | 5′-AAAGGGGCAUCCACAGACAUC-3′ | 170 |
| NM_005857.2 | Hs.132642 | ZMPSTE24 | Zinc metallopeptidase (STE24 | 5′-TTAT TCTTCTCTTTGGAGGA-3′ | 171 |
| | | | homolog, yeast) | | |
| NM_005572 | Hs.491359 | LMNA | Lamin A/C | 5′-ACTGGACTTCCAGAAGAAC-3′ | 172 |
| NM_015878.3 | Hs.459106 | OAZIN | Ornithine decarboxylase | 5′-AATTGCACGTAATCACCCAAA-3′ | 173 |
| | | | antizyme inhibitor | | |
| NM_015878.3 | Hs.459106 | OAZIN | Ornithine decarboxylase | 5′-AAGAAATACAAGGAAGATGAG-3′ | 174 |
| | | | antizyme inhibitor | | |
| NM_001664.2 | Hs.247077 | RHOA | Ras homolog gene family, | 5′-GACAUGCUUGCUCAUAGUCTT-3′ | 175 |
| | | | member A | | |
| NM_175744.3 | Hs.502659 | RHOC | Ras homolog gene family, | 5′-GACCUGCCUCCUCAUCGUCTT-3′ | 176 |
| | | | member C | | |
| NM_000041.2 | Hs.515465 | APOE | Apolipoprotein E | 5′-AAGGTGGAGCAAGCGGTGGAG-3′ | 177 |
| NM_000041.2 | Hs.515465 | APOE | Apolipoprotein E | 5′-AAGGAGTTGAAGGCCTACAAA-3′ | 178 |
| AF520590.1 | Hs.53600 | BAK1 | BCL2-antagonist/killer 1 | 5′-UGCCUACGAACUCUUCACCdTdT-3′ | 179 |
| NM_138761.2 | Hs.159428 | BAX | BCL2-associated X protein | 5′-UAUGGAGCUGCAGAGGAUGdTdT-3′ | 180 |
| NM_005733.1 | Hs.73625 | KIF20A | Kinesin family member 20A | 5′-TTGGCCAAGCCACACACAG-3′ | 181 |
| NM_005733.1 | Hs.73625 | KIF20A | Kinesin family member 20A | 5′-GTTCTCAGCCATTGCTAGC-3′ | 182 |
| NM_005733.1 | Hs.73625 | KIF20A | Kinesin family member 20A | 5′-GGCAGCATGTATTGCTGAG-3′ | 183 |
| NM_014034.1 | Hs.292316 | ASF1A | ASF1 anti-silencing function 1 | 5′-AAUCCAGGACUCAUUCCAGAU-3′ | 184 |
| | | | homolog A (S. cerevisiae) | | |
| NM_014034.1 | Hs.292316 | ASF1A | ASF1 anti-silencing function 1 | 5′-AAGUGAAGAAUACGAUCAAGU-3′ | 185 |
| | | | homolog A (S. cerevisiae) | | |
| NM_018154.1 | Hs.26516 | ASF1B | ASF1 anti-silencing function 1 | 5′-AACAACGAGUACCUCAACCCU-3′ | 186 |
| | | | homolog B (S. cerevisiae) | | |
| NM_022110.3 | Hs.520042 | WISp39 | FK506 binding protein like | 5′ AACGCUUGAGCUGGAAGG 3′ | 187 |
| NM_022110.3 | Hs.520042 | WISp39 | FK506 binding protein like | 5′-CCUUCAAGCUUCUGAUCUC-3′ | 188 |
| NM_000389.2 | Hs.370771 | CDKN1A | Cyclin-dependent kinase | 5′-AACUUCGACUUUGUCACCGAG-3′ | 189 |
| | | | inhibitor 1A (p21, Cip1) | | |
| NM_004064.2 | Hs.238990 | CDKN1B | Cyclin-dependent kinase | 5′-AAGCACUGCAGAGACAUGGAAG-3′ | 190 |
| | | | inhibitor 1B (p27, Kip1) | | |
| NM_033084.2 | Hs.208388 | FANCD2 | Fanconi anemia, | 5′-AACAGCCATGGATACACTTGA-3′ | 191 |
| | | | complementation group D2 | | |
| NM_001641.2 | Hs.73722 | APEX1 | APEX nuclease | 5′-AATGACAAAGAGGCAGCAGG-3′ | 192 |
| | | | (multifunctional DNA repair | | |
| | | | enzyme) 1 | | |
| NM_001641.2 | Hs.73722 | APEX1 | APEX nuclease | 5′-AACCTGCCACACTCAAGATC-3′ | 193 |
| | | | (multifunctional DNA repair | | |
| | | | enzyme) 1 | | |
| NM_001641.2 | Hs.73722 | APEX1 | APEX nuclease | 5′-AGCTGAACTTCAGGAGCTGCC-3′ | 194 |
| | | | (multifunctional DNA repair | | |
| | | | enzyme) 1 | | |
| NM_001641.2 | Hs.73722 | APEX1 | APEX nuclease | 5′-AAGCCTTTCGCAAGTTCCTGA-3′ | 195 |
| | | | (multifunctional DNA repair | | |
| | | | enzyme) 1 | | |
| NM_001641.2 | Hs.73722 | APEX1 | APEX nuclease | 5′-ACGGCATAGGCGATGAGGAG-3′ | 196 |
| | | | (multifunctional DNA repair | | |
| | | | enzyme) 1 | | |
| NM_001641.2 | Hs.73722 | APEX1 | APEX nuclease | 5′-AGGAAGGCCGGGTGATTGTG-3′ | 197 |
| | | | (multifunctional DNA repair | | |
| | | | enzyme) 1 | | |
| NM_001641.2 | Hs.73722 | APEX1 | APEX nuclease | 5′-GTCTGGTACGACTGGAGTA-3′ | 198 |
| | | | (multifunctional DNA repair | | |
| | | | enzyme) 1 | | |
| NM_001641.2 | Hs.73722 | APEX1 | APEX nuclease | 5′-GACAGCTTTAGGCACCTCTA-3′ | 199 |
| | | | (multifunctional DNA repair | | |
| | | | enzyme) 1 | | |
| NM_015641.2 | Hs.533391 | TES | Testis derived transcript (3 | 5′-GGAUUCGAACUGCACUUCU-3′ | 200 |
| | | | LIM domains) | | |
| NM_015641.2 | Hs.533391 | TES | Testis derived transcript (3 | 5′-ACUGUGGCACCCAGCUUGU-3′ | 201 |
| | | | LIM domains) | | |
| NM_003461.3 | Hs.490415 | ZYX | Zyxin | 5′-GCCCAAAGUGAAUCCCUUC-3′ | 202 |
| NM_002880.2 | Hs.159130 | RAF1 | V-raf-1 murine leukemia viral | 5′-TTTGAATATCTGTGCTGAGAACACA | 203 |
| | | | oncogene homolog 1 | GTTCTCAGCACAGATATTCTTTTT-3′ | |
| NM_002880.2 | Hs.159130 | RAF1 | V-raf-1 murine leukemia viral | 5′-TTTGTCAATTAGCTGGAACATCACAG | 204 |
| | | | oncogene homolog 1 | ATGTTCCAGCTAATTGACTTTTT-3′ | |
| NM_004506.2 | Hs.158195 | HSF2 | Heat shock transcription | 5′-AATGAGAAAAGCAAAAGGTGCCCTGT | 205 |
| | | | factor 2 | CTC-3′ | |
| NM_005356.2 | Hs.470627 | LCK | Lymphocyte-specific protein | 5′-CAUCGAUGUGUGUGAGAACUGC-3′ | 206 |
| | | | tyrosine kinase | | |
| NM_005546.3 | Hs.483938 | ITK | IL2-inducible T-cell kinase | 5′-CUGUUCUCAGCUGGAGAAGCUU-3′ | 207 |
| NM_005546.3 | Hs.483938 | ITK | IL2-inducible T-cell kinase | 5′-GGAGCCUUCAUGGUAAGGGAUU-3′ | 208 |
| NM_002133.1 | Hs.517581 | HMOX1 | Heme oxygenase (decycling) 1 | 5′-GGCACCATGAAGGCG-3′ | 209 |
| NM_000639.1 | Hs.2007 | FASLG | Tumor necrosis factor (ligand) | 5′-CUGGGCU GUACU UUGUA UATT-3′ | 210 |
| | | | superfamily, member 6 | | |
| NM_018417.2 | Hs.320892 | SAC | Testicular soluble adenylyl | 5′-AUGUAGCCUGGAGAUCCAUUU-3′ | 211 |
| | | | cyclase | | |
| NM_003743.3 | Hs.412293 | NCOA1 | Nuclear receptor coactivator 1 | 5′-CCUCAGGGCAGAGAACCAUCUdTdT-3′ | 212 |
| NM_005572.2 | Hs.491359 | LMNA | Lamin A/C | 5′-CUGGACUUCCAGAAGAACAUCdTdT-3′ | 213 |
| NM_176871.2 | Hs.521444 | PDLIM2 | PDZ and LIM domain 2 | 5′-AAGAUCCGCCAGAGCCCCUCG-3′ | 214 |
| | | | (mystique) | | |
| NM_014188.2 | Hs.30026 | HSPC182 | HSPC182 protein | 5′-AACAGGGACTCACGTGAAGCT-3′ | 215 |
| NM_014188.2 | Hs.30026 | HSPC182 | HSPC182 protein | 5′-AAGACCTGTTTGATCTGATCC-3′ | 216 |
| AF263744.1 | Hs.519346 | ERBB2IP | Erbb2 interacting protein | 5′-UAGACUGACCCAGCUGGAAdTdT-3′ | 217 |
| NM_002583.2 | Hs.406074 | PAWR | PRKC, apoptosis, WT1, | 5′-GAUGCAAUUACACAACAGAdTdT-3′ | 218 |
| | | | regulator | | |
| NM_003766.2 | Hs.12272 | BECN1 | Beclin 1 (coiled-coil, myosin- | 5′-CUCAGGAGAGGAGCCAUUU-3′ | 219 |
| | | | like BCL2 interacting protein) | | |
| NM_003766.2 | Hs.12272 | BECN1 | Beclin 1 (coiled-coil, myosin- | 5′-GAUUGAAGACACAGGAGGC-3′ | 220 |
| | | | like BCL2 interacting protein) | | |
| NM_004849.1 | Hs.486063 | APG5L | APG5 autophagy 5-like (S. | 5′-GCAACUCUGGAUGGGAUUG-3′ | 221 |
| | | | cerevisiae) | | |
| NM_031482.3 | Hs.527193 | APG10L | APG10 autophagy 10-like (S. | 5′-GGAGUUCAUGAGUGCUAUA-3′ | 222 |
| | | | cerevisiae) | | |
| NM_004707.2 | Hs.264482 | APG12L | APG12 autophagy 12-like (S. | 5′-CAGAGGAACCUGCUGGCGA-3′ | 223 |
| | | | cerevisiae) | | |
| NM_002613.2 | Hs.459691 | PDPK1 | 3-phosphoinositide dependent | 5′-AACTGGCAACCTCCAGAGAAT-3′ | 224 |
| | | | protein kinase-1 | | |
| NM_002613.2 | Hs.459691 | PDPK1 | 3-phosphoinositide dependent | 5′-AAGAGACCTCGTGGAGAAACT-3′ | 225 |
| | | | protein kinase-1 | | |
| NM_000314.2 | Hs.500466 | PTEN | Phosphatase and tensin | 5′-AACAGTAGAGGAGCCGTCAAA-3′ | 226 |
| | | | homolog (mutated in multiple | | |
| | | | advanced cancers 1) | | |
| NM_006092.1 | Hs.405153 | CARD4 | Caspase recruitment domain | 5′-GGGUGAGACCAUCUUCAUCTT-3′ | 227 |
| | | | family, member 4 | | |
| NM_006092.1 | Hs.405153 | CARD4 | Caspase recruitment domain | 5′-GGCCAAAGUCUAUGAAGAUTT-3′ | 228 |
| | | | family, member 4 | | |
| NM_000598.3 | Hs.450230 | IGFBP3 | Insulin-like growth factor | 5′-AAUCAUCAUCAAGAAAGGGCA-3′ | 229 |
| | | | binding protein 3 | | |
| NM_006839.1 | Hs.148559 | IMMT | Inner membrane protein, | 5′-AAUUGCUGGAGCUGGCCUUTT-3′ | 230 |
| | | | mitochondrial (mitofilin) | | |
| NM_016485.3 | Hs.431367 | C6ORF55 | Chromosome 6 open reading | 5′-GAATGAAGATCGATAGTAA-3′ | 231 |
| | | | frame 55 | | |
| NM_016485.3 | Hs.431367 | C6ORF55 | Chromosome 6 open reading | 5′-GCACAGGTGTAGCAAGTAA-3′ | 232 |
| | | | frame 55 | | |
| NM_016485.3 | Hs.431367 | C6ORF55 | Chromosome 6 open reading | 5′-GGAGAATTATGCTTTGAAA-3′ | 233 |
| | | | frame 55 | | |
| NM_016485.3 | Hs.431367 | C6ORF55 | Chromosome 6 open reading | 5′-GCAGTGCTTTGCAGTATGA-3′ | 234 |
| | | | frame 55 | | |
| NM_016410.2 | Hs.415534 | SNF7DC2 | SNF7 domain containing 2 | 5′-CAGAAAGCCTTGCGAGTTT-3′ | 235 |
| NM_016410.2 | Hs.415534 | SNF7DC2 | SNF7 domain containing 2 | 5′-GAATTTGGATTGCCACA3A-3′ | 236 |
| NM_016410.2 | Hs.415534 | SNF7DC2 | SNF7 domain containing 2 | 5′-GAAGGTGTTCCCACTGATA-3′ | 237 |
| NM_016410.2 | Hs.415534 | SNF7DC2 | SNF7 domain containing 2 | 5′-GAGAGGGTCCTGCAAAGAA-3′ | 238 |
| NM_199185.1 | Hs.519452 | NPM1 | Nucleophosmin (nucleolar | 5′-UGAUGAAAAUGAGCACCAG-3′ | 239 |
| | | | phosphoprotein B23, numatrin | | |
| NM_003118.2 | Hs.111779 | SPARC | Secreted protein, acidic | 5-AAAATCCCTGCCAGAACCACC-3′ | 240 |
| | | | cysteine-rich | | |
| NM_003118.2 | Hs.111779 | SPARC | Secreted protein, acidic, | 5-AACAAGACCTTCGACTCTTCC-3′ | 241 |
| | | | cysteine-rich | | |
| NM_003183.3 | Hs.404914 | ADAM17 | A disintegrin and | 5′-AAACGAAAGCGAGTACACT-3′ | 242 |
| | | | metalloproteinase domain 17 | | |
| | | | (tumor necrosis factor, alpha, | | |
| | | | converting enzyme) | | |
| NM_012164.2 | Hs.494985 | FBXW2 | F-box and WD-40 domain | 5′-AGATGGACTTCTCTGTACAGG-3′ | 243 |
| | | | protein 2 | | |
| NM_012164.2 | Hs.494985 | FBXW2 | F-box and WD-40 domain | 5′-GACATTGTCTGTCTCTGAGGA-3′ | 244 |
| | | | protein 2 | | |
| NM_175940.1 | Hs.272813 | DUOX1 | Dual oxidase 1 | 5′-GGACUUAUCCUGGCUAGAGtt-3′ | 245 |
| NM_004503.2 | Hs.820 | HOXC6 | Homeo box C6 | 5′ CCGGAUCUACUCGACUCCCTT 3′ | 246 |
| NM_004503.2 | Hs.820 | HOXC6 | Homeo box C6 | 5′ CCUAAUCACACACUCUGLATT 3′ | 247 |
| NM_004503.2 | Hs.820 | HOXC6 | Homeo box C6 | 5′ ACUGCAGACAAAACACCUUTT 3′ | 248 |
| NM_004503.2 | Hs.820 | HOXC6 | Homeo box C6 | 5′ UCCAACCUCUGGGUCCGUUTT 3′ | 249 |
| NM_004503.2 | Hs.820 | H0XC6 | Homeo box C6 | 5′ ACUGUGACCGUUUCUGUGUTT 3′ | 250 |
| NM_004503.2 | Hs.820 | HOXC6 | Homeo box C6 | 5′ CUCAGACUCUACAGAUUGCTT 3′ | 251 |
| NM_182965.1 | Hs.68061 | SPHK1 | Sphingosine kinase 1 | 5′-GGG CAA GGC CUU GCA GCU C-3′ | 252 |
| NM_003329.2 | Hs.435136 | TXN | Thioredoxin | 5′-AUGACUGUCAGGAUGUUGCdTT-3′ | 253 |
| NM_003329.2 | Hs.435136 | TXN | Thioredoxin | 5′-GCAACAUCCUGACAGUCAUdCC-3′ | 254 |
| NM_203500.1 | Hs.465870 | KEAP1 | Kelch-like ECH-associated | 5′-UGAACGGUGCUGUCAUGUAdTdT-3′ | 255 |
| | | | protein 1 | | |
| NM_005239.4 | Hs.517296 | ETS2 | V-ets erythroblastosis virus | 5′-GCAGAGGUUCGGCAUGAAUdTdT-3′ | 256 |
| | | | E26 oncogene homolog 2 | | |
| | | | (avian) | | |
| NM_002067.1 | Hs.515056 | GNA11 | Guanine nucleotide binding | 5′-AAGATGTTCGTGGACCTG1AC-3′ | 257 |
| | | | protein (G protein), alpha 11 | | |
| | | | (Gq class) | | |
| NM_004827.1 | Hs.480218 | ABCG2 | ATP-binding cassette, sub- | 5′-AAGATGATTGTTCGTCCCTGCTAT | 258 |
| | | | family G (WHITE), member 2 | AGTGAGTCGTATTA-3′ | |
| NM_000610.3 | Hs.502328 | CD44 | CD44 antigen (homing | 5′-GAACGAAUCCUGAAGACAUCU-3′ | 259 |
| | | | function and Indian blood | | |
| | | | group system) | | |
| NM_003489.1 | Hs.155017 | NRIP1 | Nuclear receptor interacting | 5′-GAAGGAAGCUUUGCUAGCU-3′ | 260 |
| | | | protein 1 | | |
| NM_004995.2 | Hs.2399 | MMP14 | Matrix metalloproteinase 14 | 5′-AAGCCTGGCTACAGCAATATGCCTGT | 261 |
| | | | | CTC-3′ | |
| NM_022045.2 | Hs.546363 | MTBP | Mdm2, transformed 3T3 cell | 5′ GGCUCAUUUGCACUCAAUU 3′ | 262 |
| | | | double minute 2, p53 binding | | |
| | | | protein (mouse) binding | | |
| | | | protein, 104 kDa | | |
| NM_002392.2 | Hs.369849 | MDM2 | Mdm2, transformed 3T3 cell | 5′ GCCACAAAUCUGAUAGUAU 3′ | 263 |
| | | | double minute 2, p53 binding | | |
| | | | protein (mouse) | | |
| NM_170707.1 | Hs.491359 | LMNA | Lamin A/C | 5′ CUGGACUUCCAGAAGAACA 3′ | 264 |
| NM_004759.3 | Hs.519276 | MAPKAPK2 | Mitogen-activated protein | 5′-UGACCAUCACCGAGUUUAUdTdT-3′ | 265 |
| | | | kinase-activated protein kinase | | |
| | | | 2 | | |
| NM_001948.2 | Hs.527980 | DUT | DUTP pyrophosphatase | 5′-GATTATAGGAAATGTTG-3′ | 266 |
| NM_016022.1 | Hs.108408 | APH-1A | Likely ortholog of C. elegans | 5′-AAGAAGGCAGATGAGGGGTTA-3′ | 267 |
| | | | anterior pharynx defective 1A | | |
| NM_031301.2 | Hs.511703 | PSFL | Anterior pharynx defective 1B- | 5′-AACAAAGATGGACCAACACAG-3′ | 268 |
| | | | like | | |
| BC007496.1 | Hs.36915 | SMAD3 | SMAD, mothers against DPP | 5′-GGACGAGGUCUGCGUGAAUdTdT-3′ | 269 |
| | | | homolog 3 (Drosophila) | | |
| NM_182763.1 | Hs.532826 | MCL1 | Myeloid cell leukemia | 5′-AAGAAACGCGGUAAUCGGACU-3′ | 270 |
| | | | sequence 1 (BCL2-related) | | |
| NM_001022.3 | Hs.438429 | RPS19 | Ribosomal protein S19 | 5′-GCACAAAGAGCTTGCTCCCttcaagaga | 271 |
| | | | | GGGAGCAAGCTCTTTGTGC-3′ | |
| NM_001022.3 | Hs.438429 | RPS19 | Ribosomal protein S19 | 5′-GTCCGGGAAGCTGAAAGTCttcaagaga | 272 |
| | | | | GACTTTCAGCTTCCCGGAC-3′ | |
| NM_001022.3 | Hs.438429 | RPS19 | Ribosomal protein S19 | 5′-GAGATCTGGACAGAATCGCttcaagaga | 273 |
| | | | | GCGATTCTGTCCAGATCTC-3′ | |
| NM_001400.2 | Hs.154210 | EDG1 | Endothelial differentiation, | 5′-GGAGAACAGCATTAAACTG-3′ | 274 |
| | | | sphingolipid G-protein-coupled | | |
| | | | receptor, 1 | | |
| NM_001001938.1 | Hs.546252 | C9orf47 | Chromosome 9 open reading | 5′-GGTCAACATTCTGATGTCT-3′ | 275 |
| | | | frame 47 | | |
| NM_021972.2 | Hs.68061 | SPHK1 | Sphingosine kinase 1 | 5′-GGGCAAGGCCTTGCAGCTC-3′ | 276 |
| NM_016068.1 | Hs.423968 | TTC11 | Tetratricopeptide repeat | 5′-GTACAATGATGACATCCGTAA-3′ | 277 |
| | | | domain 11 | | |
| NM_016068.1 | Hs.423968 | TTC11 | Tetratricopeptide repeat | 5′-GTACGTCCGCGGGTTGCTGCA-3′ | 278 |
| | | | domain 11 | | |
| NM_153831.2 | Hs.395482 | PTK2 | PTK2 protein tyrosine kinase 2 | 5′-AAGCAUGUGGCCUGCUAUGGA-3′ | 279 |
| NM_003749.2 | Hs.442344 | IRS2 | Insulin receptor substrate 2 | 5′-GATCCCGCCTCAACAACAACAACAACT | 280 |
| | | | | TCAAGAGAGTTGTTGTTGTTGTTGAGGTTT | |
| | | | | TTTGGAAA-3′ | |
| NM_000691.3 | Hs.531682 | ALDH3A1 | Aldehyde dehydrogenase 3 | 5′-AAG AAG AGC UUC GAG ACU | 281 |
| | | | family, member A1 | UUC-3′ | |
| NM_000689.3 | Hs.76392 | ALDH1A1 | Aldehyde dehydrogenase 1 | 5′-AAC TGG GAG AGT ACG GTT | 282 |
| | | | family, member A1 | TCC-3′ | |
| NM_000604.2 | Hs.549034 | FGFR1 | Fibroblast growth factor | 5′-AAGTCGGACGCAACAGAGAAA-3′ | 283 |
| | | | receptor 1 (fms-related | | |
| | | | tyrosine kinase 2, Pfeiffer | | |
| | | | syndrome) | | |
| NM_006006.3 | Hs.171299 | ZBTB16 | Zinc finger and BTB domain | 5′-GGCCAACCAGAUGCGGCUGUU-3′ | 284 |
| | | | containing 16 | | |
| NM_006006.3 | Hs.171299 | ZBTB16 | Zinc finger and BTB domain | 5′-GAUGUUUGACAUCCUCUUCUU-3′ | 285 |
| | | | containing 16 | | |
| NM_004348.1 | Hs.122116 | RUNX2 | Runt-related transcription | 5′-GGCUGCAAGCAGUAUUUACUU-3′ | 286 |
| | | | factor 2 | | |
| NM_004348.1 | Hs.122116 | RUNX2 | Runt-related transcription | 5′-GGACAGAGUCAGAUUACAGUU-3′ | 287 |
| | | | factor 2 | | |
| NM_014382.2 | Hs.546361 | ATP2C1 | ATPase, Ca++ transporting, | 5′-AGCCACTGTGGAAGAAGTATATT-3′ | 288 |
| | | | type 2C, member 1 | | |
| NM_002083.2 | Hs.2704 | GPX2 | Glutathione peroxidase 2 | 5′-CCCUCUGGUUGGUGAUUCAdTdT-3′ | 289 |
| | | | (gastrointestinal) | | |
| NM_002083.2 | Hs.2704 | GPX2 | Glutathione peroxidase 2 | 5′-GGAUGAUGGCACCUUCCUAdTdT-3′ | 290 |
| | | | (gastrointestinal) | | |
| NM_000942.4 | Hs.434937 | PP1B | Peptidylprolyl isomerase B | 5′-AATTGGAGATGAAGATGTAGG-3′ | 291 |
| | | | (cyclophilin B) | | |
| NM_003153.3 | Hs.524518 | STAT6 | Signal transducer and activator | 5′-CAGUUCCGCCACUUGCCAAdTdT-3′ | 292 |
| | | | of transcription 6, | | |
| | | | interleukin-4 induced | | |
| NM_003153.3 | Hs.524518 | STAT6 | Signal transducer and activator | 5′-AGCCUGGUGGACAUUUAUUdTdT-3′ | 293 |
| | | | of transcription 6, | | |
| | | | interleukin-4 induced | | |
| NM_003153.3 | Hs.524518 | STAT6 | Signal transducer and activator | 5′-GAUGUGUGAAACUCUGAACdTdT-3′ | 294 |
| | | | of transcription 6, | | |
| | | | interleukin-4 induced | | |
| NM_003153.3 | Hs.524518 | STAT6 | Signal transducer and activator | 5′-CAGAUGGGUAAGGAUGGCAdTdT-3′ | 295 |
| | | | of transcription 6, | | |
| | | | interleukin-4 induced | | |
| NM_002945.2 | Hs.461925 | RPA1 | Replication protein A1, 70 kDa | 5′-AAGCACUAUCAUUGCGAAUCC-3′ | 296 |
| NM_003169.2 | Hs.437056 | SUPT5H | Suppressor of Ty 5 homolog | 5′-AACTGGGCGAGTATTACATGA-3′ | 297 |
| NM_003318.3 | Hs.169840 | TTK | TTK protein kinase | 5′-TGAACAAAGTGAGAGACAT-3′ | 298 |
| NM_007194.3 | Hs.291363 | CHEK2 | CHK2 checkpoint homolog | 5′-AATGTGTGAATGACAACTACT-3′ | 299 |
| | | | (S. pombe) | | |
| NM_002358.2 | Hs.533185 | MAD2L1 | MAD2 mitotic arrest deficient- | 5′-AATACGGACTCACCTTGCTTG-3′ | 300 |
| | | | like 1 (yeast) | | |
| NM_001401.3 | Hs.126667 | EDG2 | Endothelial differentiation, | 5′-r(CCGCCGCUUCCAUUUUUCCU)d | 301 |
| | | | lysophosphatidic acid G- | (TT)-3′ | |
| | | | protein-coupled receptor, 2 | | |
| NM_001401.3 | Hs.126667 | EDG2 | Endothelial differentiation, | 5′-r(AGGAAAAAUGGAAGCGGCGGG) | 302 |
| | | | lysophosphatidic acid G- | d(TT)-3′) | |
| | | | protein-coupled receptor, 2 | | |
| NM_004448.2 | Hs.446352 | ERBB2 | V-erb-b2 erythroblastic | 5′-CCUGGAACUCACCUACCUGdTdT-3′ | 303 |
| | | | leukemia viral oncogene | | |
| | | | homolog 2 | | |
| NM_004448.2 | Hs.446352 | ERBB2 | V-erb-b2 erythroblastic | 5′-CUACCUUUCUACGGACGUGdTdT-3′ | 304 |
| | | | leukemia viral oncogene | | |
| | | | homolog 2 | | |
| NM_004448.2 | Hs.446352 | ERBB2 | V-crb-b2 crythroblastic | 5′-GAUCCGGAAGUACACGAUGdTdT-3′ | 305 |
| | | | leukemia viral oncogene | | |
| | | | homolog 2 | | |
| NM_014812.1 | Hs.533635 | KAB | KARP-1-binding protein | 5′-GAAGGAAUCCUCCAAGUCA-3′ | 306 |
| NM_002737.2 | Hs.531704 | PRKCA | Protein kinase C, alpha | 5′-AAGCTCCATGTCACAGTACGA-3′ | 307 |
| NM_212535.1 | Hs.460355 | PRKCB1 | Protein kinase C, beta 1 | 5′-AAGCGCTGCGTCATGAATGTT-3′ | 308 |
| NM_138578.1 | Hs.516966 | BCL2L1 | BCL2-like 1 | 5′-CTG CCT AAG GCG GAT TTG | 309 |
| | | | | AAT-3′ | |
| NM_138578.1 | Hs.516966 | BCL2L1 | BCL2-like 1 | 5′-GGC AGG CGA CGA GTT TGA | 310 |
| | | | | ACT-3′ | |
| NM_138578.1 | Hs.516966 | BCL2L1 | BCL2-like 1 | 5′-GTG CGT GGA AAG CGT AGA | 311 |
| | | | | CAA-3′ | |
| NM_004050.2 | Hs.410026 | BCL2L2 | BCL2-like 2 | 5′-GGC GGA GTT CAC AGC TCT | 312 |
| | | | | ATA-3′ | |
| NM_004050.2 | Hs.410026 | BCL2L2 | BCL2-like 2 | 5′-TG GGC ATA AGT GCT GAT | 313 |
| | | | | CTA-3′ | |
| NM_004050.2 | Hs.410026 | BCl2L2 | BCL2-like 2 | 5′-CTC GGT CCT GCG ATT ATT | 314 |
| | | | | AAT-3′ | |
| NM_003443.1 | Hs.433764 | ZBTB17 | Zinc finger and BTB domain | 5′-AAGGCCGAGATCAGCAAAGTTCAAGAG | 315 |
| | | | containing 17 | ACTTTGCTGATCTCGGCCTTTTTTTT-3′ | |
| NM_003345.3 | Hs.302903 | UBE2I | Ubiquitin-conjugating enzyme | 5′-GGC CAG CCA UCA CAA UCA | 316 |
| | | | E21 (UBC9 homolog, yeast) | ATT-3′ | |
| NM_003345.3 | Hs.302903 | UBE2I | Ubiquitin-conjugating enzyme | 5′-GGA ACU UCU AAA UGA ACC | 317 |
| | | | E2I (UBC9 homolog, yeast) | ATT-3′ | |
| NM_016166.1 | Hs.162458 | PIAS1 | Protein inhibitor of activated | 5′-GGU CCA GUU AAG GUU UUG | 318 |
| | | | STAT, 1 | UTT-3′ | |
| NM_016166.1 | Hs.62458 | PIAS1 | Protein inhibitor of activated | 5′-GGU UAC CUU CCA CCU ACA | 319 |
| | | | STAT, 1 | ATT-3′ | |
| NM_004068.2 | Hs.518460 | AP2M1 | Adaptor-related protein | 5′-AAGUGGAUGCCUUUCGGGUCA-3′ | 320 |
| | | | complex 2, mu 1 subunit | | |
| NM_004068.2 | Hs.518460 | AP2M1 | Adaptor-related protein | 5′-AAGGAGAACAGUUCUUGCGGC-3′ | 321 |
| | | | complex 2, mu 1 subunit | | |
| NM_004068.2 | Hs.518460 | AP2M1 | Adaptor-related protein | 5′-AAGGUCCAGU-CAUUCCAAAUG-3′ | 322 |
| | | | complex 2, mu 1 subunit | | |
| NM_001278.2 | Hs.198998 | CHUK | Conserved helix-loop-helix | 5′-AGGAAGGACCUGUUGACCUUTT-3′ | 323 |
| | | | ubiquitous kinase | | |
| NM_001556.1 | Hs.413513 | IKBKB | Inhibitor of kappa light | 5′-UGGUGAGCUUAAUGAAUGATT-3′ | 324 |
| | | | polypeptide gene enhancer in | | |
| | | | B-cells, kinase beta | | |
| NM_021975.2 | Hs.502875 | RELA | V-rel reticuloendotheliosis | 5′-AGAGGACAUUGAGGUGUAUTT-3′ | 325 |
| | | | viral oncogene homolog A | | |
| NM_000963.1 | Hs.196384 | PTGS2 | Prostaglandin-endoperoxide | 5′-AACTGCTCAACACCGGAATTTTT-3′ | 326 |
| | | | synthase 2 | | |
| NM_005427.1 | Hs.192132 | TP73 | Tumor protein p73 | 5′-CCAUCCUGUACAACUUCAUGUG-3′ | 327 |
| NM_005157.2 | Hs.431048 | ABL1 | V-abl Abelson murine | 5′-CAAUAAGGAAGAAGCCCUUTT-3′ | 328 |
| | | | leukemia viral oncogene | | |
| | | | homolog 1 | | |
| NM_005157.2 | Hs.431048 | ABL1 | V-abl Abelson murine | 5′-TTAUUCCUUCUUCGGGAAGUC-3′ | 329 |
| | | | leukemia viral oncogene | | |
| | | | homolog 1 | | |
| NM_001168.1 | Hs.514527 | BIRC5 | Baculoviral IAP repeat- | 5′-GGCUGGCUUCAUCCACUGCTT-3′ | 330 |
| | | | containing 5 (survivin) | | |
| NM_002940.1 | Hs.12013 | ABCE1 | ATP-binding cassette, sub- | 5′-CGAAGATGTTGACCTGGTC-3′ | 331 |
| | | | family E (OABP), member 1 | | |
| NM_002940.1 | Hs.12013 | ABCE1 | ATP-binding cassette, sub- | 5′-AGAGTTGTCCTGTAGTTCG-3′ | 332 |
| | | | family E (OABP), member 1 | | |
| NM_004208.2 | Hs.424932 | PDCD8 | Programmed cell death 8 | 5′-GGAAAUAUGGGAAAGAUCCdTdT | 333 |
| | | | (apoptosis-inducing factor) | | |
| NM_000115.1 | Hs.82002 | EDNRB | Endothelin receptor type B | 5′-GGAGACUUUCAAAUACAUCTTtt-3′ | 334 |
| NM_001712.2 | Hs.512682 | CEACAM1 | Carcinoembryonic antigen- | 5′-AACCTTCTGGAACCCGCCCAC-3′ | 335 |
| | | | related cell adhesion | | |
| | | | molecule 1 | | |
| NM_001712.2 | Hs.512682 | CEACAM1 | Carcinoembryonic antigen- | 5′-AATGTTGCAGAGGGGAAGGAG-3′ | 336 |
| | | | related cell adhesion | | |
| | | | molecule 1 | | |
| NM_033284.1 | Hs.436900 | TBL1Y | Transducin (beta)-like 1Y- | 5′-AAGAGAATGGAGCACATGAAA-3′ | 337 |
| | | | linked | | |
| NM_033284.1 | Hs.436900 | TBL1Y | Transducin (beta)-like 1Y- | 5′-AAGATGAGCATAACCAGTGAC-3′ | 338 |
| | | | linked | | |
| NM_024665.3 | Hs.438970 | TBL1XR1 | Transducin (beta)-like 1X- | 5′-AAGGCCCTATATTTGCATTAA-3′ | 339 |
| | | | linked receptor 1 | | |
| NM_173174.1 | Hs.491322 | PTK2B | PTK2B protein tyrosine kinase | 5′-GTTGGCTGAGTGCTATGGGCTGA-3′ | 340 |
| | | | 2 beta | | |
| NM_006311.2 | Hs.462323 | NCOR1 | Nuclear receptor | 5′-GGGCTTAT0GAGGACCCTATGA-3′ | 341 |
| | | | co-repressor 1 | | |
| NM_002211.2 | Hs.429052 | ITGB1 | Integrin, beta 1 | 5′-GGAACAGCAGAGAAGCTCATTCAAGAG | 342 |
| | | | | ATGAGCTTCTCTGCTGTTCCTTTTT-3′ | |
| NM_139176.2 | Hs.351118 | NALP7 | NACHT, leucine rich repeat | 5′-CACCGAAGCAGCACGACTTCTTCTTCA | 343 |
| | | | and PYD containing 7 | AGAGAGAAGAAGTCGTGCTGCTTC-3′ | |
| NM_004422.2 | Hs.118640 | DVL2 | Dishevelled, dsh homolog 2 | 5′-AGGUUCAGCAGCUCCACGGAdTdT-3′ | 344 |
| | | | (Drosophila) | | |
| NM_001228.2 | Hs.369736 | CASP8 | Caspase 8, apoptosis-related | 5′-gatccccCCTCGGGGATACTGTCTGAt | 345 |
| | | | cysteine protease | tcaagagaTCAGACAGTATCCCCGAGGttt | |
| | | | | ttggaaa-3′ | |
| NM_001769.2 | Hs.114286 | CD9 | CD9 antigen (p24) | 5′-GAGCATCTTCGAGCAAGAA-3′ | 346 |
| NM_004357.3 | Hs.512857 | CD151 | CD151 antigen | 5′-CATGTGGCACCGTTTGCCT-3′ | 347 |
| NM_003188.2 | Hs.485968 | MAP3K7 | Mitogen-activated protein | 5′-UGGCUUAUCUUACACUGGA-3′ | 348 |
| | | | kinase kinase kinase 7 | | |
| NM_006116.2 | Hs.507681 | MAP3K7IP1 | Mitogen-activated protein | 5′-GGCUCAAGUUCAGGAGUGAGAACAA-3′ | 349 |
| | | | kinase kinase kinase 7 | | |
| | | | interacting protein 1 | | |
| NM_015093.2 | Hs.269775 | MAP3K7IP2 | Mitogen-activated protein | 5′-GGAACGACUUCAAAGAGAACUUGAG-3′ | 350 |
| | | | kinase kinase kinase 7 | | |
| | | | interacting protein 2 | | |
| NM_001315.1 | Hs.485233 | MAPK14 | Mitogen-activated protein | 5′-GCAUUACAACCAGACAGUUGAUAUU-3′ | 351 |
| | | | kinase 14 | | |
| NM_006502.1 | Hs.439153 | POLH | Polymerase (DNA directed), | 5′-GUG GAG CAG CGG CAA AAU | 352 |
| | | | eta | CTT-3′ | |
| NM_006502.1 | Hs.439153 | POLH | Polymerase (DNA directed), | 5′-UCC UCA UUU GAG GAA UAA | 353 |
| | | | eta | ATT-3′ | |
| NM_006502.1 | Hs.439153 | POLH | Polymerase (DNA directed), | 5′-GGA AUA AAC CUU GUG CAG | 354 |
| | | | eta | UTT-3′ | |
| NM_006502.1 | Hs.439153 | POLH | Polymerase (DNA directed), | 5′-UAA ACC UUG UGC AGU UGU | 355 |
| | | | eta | ATT-3′ | |
| NM_006502.1 | Hs.439153 | POLH | Polymerase (DNA directed), | 5′-CCU UGU GCA GUU GUA CAG | 356 |
| | | | eta | UTT-3′ | |
| NM_015321.1 | Hs.371096 | MECT1 | Mucoepidermoid carcinoma | 5′-CCGGCAACCUCGCGGCCAAUU-3′ | 357 |
| | | | translocated 1 | | |
| NM_181715.1 | Hs.406392 | TORC2 | Transducer of regulated cAMP | 5′-CGACUACCAUCUGCACUUAUU-3′ | 358 |
| | | | response element-binding | | |
| | | | protein (CREB) 2 | | |
| NM_001079.3 | Hs.234569 | ZAP70 | Zeta-chain (TCR) associated | 5′-AACCGGCTCTCCATTGGCATT-3′ | 359 |
| | | | protein kinase 70 kDa | | |
| NM_004834.3 | Hs.431550 | MAP4K4 | Mitogen-activated protein | 5′-GTGGTTGGAAATGGCACCTTT-3′ | 360 |
| | | | kinase kinase kinase kinase 4 | | |
| NM_006191.1 | Hs.524498 | PA2G4 | Proliferation-associated 2G4, | 5′-AAGCGACCAGGAUUAUAUUCU-3′ | 361 |
| | | | 38 kDa | | |
| NM_006191.1 | Hs.524498 | PA2G4 | Proliferation-associated 2G4, | 5′-AAGUGAGGUGGAAAGGCGUUU-3′ | 362 |
| | | | 38 kDa | | |
| NM_005940.3 | Hs.143751 | MMP11 | Matrix metalloproteinase 11 | 5′-TCCCATGTCCACTTCGACTATGATGTCA | 363 |
| | | | (stromelysin 3) | AGAGCATCATAGTCGAAGTGGACATTT-3′ | |
| NM_005940.3 | Hs.143751 | MMP11 | Matrix metalloproteinase 11 | 5′-TCCCAGATCTACTTCTTCCGAGGTCAAG | 364 |
| | | | (stromelysin 3) | AGCCTCGGAAGAAGTAGATCTTT-3′ | |
| NM_005940.3 | Hs.143751 | MMP11 | Matrix metalloproteinase 11 | 5′-TCCCAGGATGCTGATGGCTATGCCTTCA | 365 |
| | | | (stromelysin 3) | AGAGAGGCATAGCCATCAGCATCCTTT-3′ | |
| NM_003684.3 | Hs.371594 | MKNK1 | MAP kinase interacting | 5′-AATGCCCATCTCTATAGGTTT-3′ | 366 |
| | | | serine/threonine kinase 1 | | |
| NM_003668.2 | Hs.413901 | MAPKAPK5 | Mitogen-activated protein | 5′-GGAUAUGCGAAGAAAGAUCTT-3′ | 367 |
| | | | kinase-activated protein | | |
| | | | kinase 5 | | |
| NM_004604.3 | Hs.83734 | STX4A | Syntaxin 4A (placental) | 5′-AAGGAGGAAGCTGATGAGAAC-3′ | 368 |
| NM_004177.3 | Hs.530733 | STX3A | Syntaxin 3A | 5′-AACGTCCGGAACAAACTGAAG-3′ | 369 |
| NM_001009567.1 | Hs.461247 | MRC1L1 | Mannose receptor, C type 1- | 5′-AAGTGGTACGCAGATTGCACG-3′ | 370 |
| | | | like 1 | | |
| NM_002576.3 | Hs.435714 | PAK1 | P21/Cdc42/Rac1-activated | 5′-AAGGAGAAGAAAAAGAAGGAC-3′ | 371 |
| | | | kinase 1 | | |
| NM_001664.2 | Hs.247077 | RHOA | Ras homolog gene family, | 5′-GCAGGTAGAGTTGGCTTTG-3′ | 372 |
| | | | member A | | |
| NM_175744.3 | Hs.502659 | RHOC | Ras homolog gene family, | 5′-GACTATGATCGACTGCGGC-3′ | 373 |
| | | | member C | | |
| NM_080491.1 | Hs.429434 | GAB2 | GRB2-associated binding | 5′-GTGAGAACGATGAGAAATA-3′ | 374 |
| | | | protein 2 | | |
| NM_080491.1 | Hs.429434 | GAB2 | GRB2-associated binding | 5′-GTTGGTGCCTAATCACTTA-3′ | 375 |
| | | | protein 2 | | |
| NM_005225.1 | Hs.96055 | E2F1 | E2F transcription factor 1 | 5′-GACGTGTCAGGACCTTCGT-3′ | 376 |
| NM_005225.1 | Hs.96055 | E2F1 | E2F transcription factor 1 | 5′-CTTAACTGGTGTACATTAA-3′ | 377 |
| NM_006392.2 | Hs.376064 | NOL5A | Nucleolar protein 5A (56 kDa | 5′-CAAUAUGAUCAUCCAGUCCAUUA-3′ | 378 |
| | | | with KKE/D repeat) | | |
| NM_015934 | Hs.471104 | NOP5/NOP58 | Nucleolar protein | 5′-CAAGCAUGCAGCUUCUACCGUUC-3′ | 379 |
| | | | NOP5/NOP58 | | |
| NM_001436 | Hs.299002 | FBL | Fibrillarin | 5′-CAGUCGAGUUCUCCCACCGCUCU-3′ | 380 |
| NM_006666 | Hs.515846 | RUVBL2 | RuvB-like 2 (E. coli) | 5′-GAGACCAUCUACGACCUGGGCAC-3′ | 381 |
| NM_006666 | Hs.515846 | RUVBL2 | RuvB-like 2 (E. coli) | 5′-GAGAGUGACAUGGCGCCUGUCCU-3′ | 382 |
| NM_003707.1 | Hs.272822 | RUVBL2 | RuvB-like 1 (E. coli) | 5′-AAGGAACCAAACAGUUGAAACUG-3′ | 383 |
| NM_003707.1 | Hs.272822 | RUVBL2 | RuvB-like 1 (E. coli) | 5′-GAGUCUUCUAUCGCUCCCAUCGU-3′ | 384 |
| NM_004741 | Hs.523238 | NOLC1 | Nucleolar and coiled-body | 5′-AAAUUGAGGUGGAUUCACGAGUU-3′ | 385 |
| | | | phosphoprotein 1 | | |
| NM_032177 | Hs.546453 | PHAX | RNA U, small nuclear RNA | 5′-UAGUAUCAGCGAGGAACAAAUUA-3′ | 386 |
| | | | export adaptor | | |
| | | | (phosphorylation regulated) | | |
| NM_032177 | Hs.546453 | PHAX | RNA U, small nuclear RNA | 5′-AAGAGUAUAUAGCACAGGAUUUA-3′ | 387 |
| | | | export adaptor | | |
| | | | (phosphorylation regulated) | | |
| NM_024831 | Hs.335068 | NCOA6IP | Nuclear receptor coactivator 6 | 5′-AAGAUUGCCCUUGCUCGCAAUAA-3′ | 388 |
| | | | interacting protein | | |
| NM_024831 | Hs.335068 | NCOA6IP | Nuclear receptor coactivator 6 | 5′-UAUCACCGUAUGAAAUGGAAACU-3′ | 389 |
| | | | interacting protein | | |
| NM_022874.1 | Hs.202179 | SMN2 | Survival of motor neuron 1, | 5′-AAGUGGAAUGGGUAACUCUUCUU-3′ | 390 |
| | | | telomeric | | |
| NM_012321.2 | Hs.515255 | LSM4 | LSM4 homolog, U6 small | 5′-AACGGCCGUCCCAAAGCUGGCUG-3′ | 391 |
| | | | nuclear RNA associated | | |
| NM_016200.2 | Hs.446179 | LSM8 | LSM8 homolog, U6 small | 5′-AAGAAACAGAUUCUGCGCUUGAU-3′ | 392 |
| | | | nuclear RNA associated | | |
| NM_003142 | Hs.546301 | SSB | Sjogren syndrome antigen B | 5′-GAAUUAGGUCCACUUCAAUGUCC-3′ | 393 |
| | | | (autoantigen La) | | |
| NM_003142 | Hs.546301 | SSB | Sjogren syndrome antigen B | 5′-AAGAUUCUUCCAUUAAAUUGCCU-3′ | 394 |
| | | | (autoantigen La) | | |
| NM_001228 | Hs.369736 | CASP8 | Caspase 8, apoptosis-related | 5′-AACTACCAGAAAGGTATACCT-3′ | 395 |
| | | | cysteine protease | | |
| NM_003842.3 | Hs.521456 | TNFRSF10B | Tumor necrosis factor receptor | 5′-AAGACCCTTGTGCTCGTTGTC-3′ | 396 |
| | | | superfamily, member 10b | | |
| NM_017672.2 | Hs.512894 | TRPM7 | Transient receptor potential | 5′-AAGCAGAGTGACCTGGTAGAT-3′ | 397 |
| | | | cation channel, subfamily M, | | |
| | | | member 7 | | |
| NM_007294.1 | Hs.194143 | BRCA1 | Breast cancer 1, early onset | 5′-UCACAGUGUCCUUUAUGUAdTdT-3′ | 398 |
| NM_033238.1 | Hs.526464 | PML | Promyelocytic leukemia | 5′-AUGGCUUCGACGAGUUCAATT-3′ | 399 |
| NM_000546.2 | Hs.408312 | TP53 | Tumor protein p53 (Li- | 5′-GCAUGAACCGGAGGCCCAUTT-3′ | 400 |
| | | | Fraumeni syndrome) | | |
| NM_002198.1 | Hs.436061 | IRF1 | Interferon regulatory factor 1 | 5′-AGACCAGAGCAGGAACAAGTT-3′ | 401 |
| NM_024790.3 | Hs.370147 | FLJ22490 | Hypothetical protein FLJ22490 | 5′-GAAGATTTGCGCAGTGGAC-3′ | 402 |
| NM_000546.2 | Hs.408312 | TP53 | Tumor protein P53 (Li- | 5′-UGGUUCACUGAAGACCCAGUU-3′ | 403 |
| | | | Fraumeni syndrome) | | |
| NM_002880.2 | Hs.159130 | RAF1 | V-raf-1 murine leukemia viral | 5′-AUUCCUGCUCAAUGGAUUUdTdT-3′ | 404 |
| | | | oncogene homolog 1 | | |
| NM_198400.1 | Hs.1565 | NEDD4 | Neural precursor cell | 5′-TAGAGCCTGGCTGGGTTGTTTTG-3′ | 405 |
| | | | expressed, developmentally | | |
| | | | down-regulated 4 | | |
| NM_015277.2 | Hs.185677 | NEDD4L | Neural precursor cell | 5′-AACCACAACACAAAGTCACAG-3′ | 406 |
| | | | expressed, developmentally | | |
| | | | down-regulated 4-like | | |
| NM_016931.2 | Hs.371036 | NOX4 | NADPH oxidase 4 | 5′-AAACCGGCAGGAGUUUACCCAG-3′ | 407 |
| NM_005975.2 | Hs.51133 | PTK6 | PTK6 protein tyrosine kinase 6 | 5′-AAGGUGGCCAUUAAGGUGAUU-3′ | 408 |
| NM_005531.1 | Hs.380250 | IFI16 | Interferon, gamma-inducible | 5′-UCAGAAGACCACAAUCUAC-3′ | 409 |
| | | | protein 16 | | |
| NM_000633.1 | Hs.150749 | BCL2 | B-cell CLL/lymphoma 2 | 5′-GUGAAGUCAACAUGCCUGC-dTdT-3′ | 410 |
| NM_182981.1 | Hs.528383 | OKL38 | Pregnancy-induced growth | 5′-CACCCUACACGAAGCCAGATT-3′ | 411 |
| | | | inhibitor | | |
| NM_002961.2 | Hs.81256 | S100A4 | S100 calcium binding protein | 5′-GGA CAG AUG AAG CUG CUU | 412 |
| | | | A4 | UTT-3′ | |
| NM_014585.3 | Hs.529285 | SLC40A1 | Solute carrier family 40 | 5′-GGTGGACAAGAATGCTAGAC-3′ | 413 |
| | | | (iron-regulated transporter), | | |
| | | | member 1 | | |
| NM_014585.3 | Hs.529285 | SLC40A1 | Solute carrier family 40 | 5′-GAAGGATTGACCAGTTAACC-3′ | 414 |
| | | | (iron-regulated transporter), | | |
| | | | member 1 | | |
| NM_014585.3 | Hs.529285 | SLC40A1 | Solute carrier family 40 | 5′-GCTTGAACATGAGCAAGAGC-3′ | 415 |
| | | | (iron-regulated transporter), | | |
| | | | member 1 | | |
| NM_021127.1 | Hs.96 | PMAIP1 | Phorbol-12-myristate-13- | 5′-AACTTCCGGCAGAAACTTCTG-3′ | 416 |
| | | | acetate-induced protein 1 | | |
| NM_002467.2 | Hs.202453 | MYC | V-myc myelocytomatosis viral | 5′-GCCACAGCAUACAUCCUGUdTdT-3′ | 417 |
| | | | oncogene homolog (avian) | | |
| NM_002187.2 | Hs.674 | IL12B | Interleukin 12B | 5′-CGCACGCUAAUGCUGGCAU1TdT-3′ | 418 |
| NM_019887.3 | Hs.169611 | DIABLO | Diablo homolog (Drosophila) | 5′-AAGCGGUGUUUCUCAGAATTGtt-3′ | 419 |
| NM_017563 | Hs.150725 | IL17RD | Interleukin 17 receptor D | 5′-GUCGG AGGGA AGACA GUGCT T-3′ | 420 |
| NM_017563 | Hs.150725 | IL17RD | Interleukin 17 receptor D | 5′-GCAUG UGAUU GCUGA CGCCT T-3′ | 421 |
| NM_003142.2 | Hs.546301 | SSB | Sjogren syndrome antigen B | 5Õ-AAGGCTTCCC AACTGATGC AA-3Õ | 422 |
| | | | (autoantigen La) | | |
| NM_003142.2 | Hs.546301 | SSB | Sjogren syndrome antigen B | 5Õ-AAGCCAAG GAAGCAT TGGGTA-3Õ | 423 |
| | | | (autoantigen La) | | |
| NM_003142.2 | Hs.546301 | SSB | Sjogren syndrome antigen B | 5Õ-AAGTACTAGAA GGAGAGGTGG-3Õ | 424 |
| | | | (autoantigen La) | | |
| NM_006101 | Hs.414407 | KNTC2 | Kinctochore associated 2 | 5′-GTTCAAAAGCTGGATGATCTT-3′ | 425 |
| NM_145697 | Hs.234545 | CDCA1 | Cell division cycle associated 1 | 5′-AAGATACGGTCCAGAAGCTTA-3′ | 426 |
| NM_003550 | Hs.209128 | MAD1L1 | MAD1 mitotic arrest deficient- | 5′-CCAGCGGCTCAAGGAGGTTTT-3′ | 427 |
| | | | like 1 | | |
| NM_002358 | Hs.533185 | MAD2L1 | MAD2 mitotic arrest deficient- | 5′-GAGTCGGGACCACAGTTTATT-3′ | 428 |
| | | | like 1 | | |
| NM_004336 | Hs.469649 | BUB1 | BUB1 budding uninhibited by | 5′-TAGGCTAATTGTACTGCTCTT-3′ | 429 |
| | | | benzimidazoles 1 homolog | | |
| NM_001211.4 | Hs.36708 | BUB1B | BUB1 budding uninhibited by | 5′-GGAGATCCTCTACAAAGGGTT-3′ | 430 |
| | | | benzimidazoles 1 homolog beta | | |
| NM_016343.3 | Hs.497741 | CENPF | Centromere protein F, | 5′-AAGAGATGCTAATAGCAGTTT-3′ | 431 |
| | | | 350/400 ka (mitosin) | | |
| NM_001813 | Hs.75573 | CENPE | Centromere protein E, 312 kDa | 5′-ACTCTTACTGCTCTCCAGTTT-3′ | 432 |
| NM_004217 | Hs.442658 | AURKB | Aurora kinase B | 5′-CGAGACCTATCGCCGCATCGT-3′ | 433 |
| NM_005030 | Hs.329989 | PLK1 | Polo-like kinase 1 | 5′-GGGCGGCTTTGCCAAGTGCTT-3′ | 434 |
| NM_004104 | Hs.83190 | FASN | Fatty acid synthase | 5′-CCCUGAGAUCCCAGCGCUGdTdT-3′ | 435 |
| NM_021975.2 | Hs.502875 | RELA | V-rel reticuloendotheliosis | 5′-GATCAATGGCTACACAGGA-3′ | 436 |
| | | | viral oncogene homolog A | | |
| NM_033256 | Hs.348037 | PPP1R14A | Protein phosphatase 1, | 5′-ACCUGUCGAGGACUUCAUCdTdT-3′ | 437 |
| | | | regulatory (inhibitor) subunit | | |
| | | | 14A | | |
| NM_177966.3 | Hs.151293 | 2′-PDE | 2′-phosphodiesterase | 5′-GUACAAGGUGGAGCGCAACdTdT-3′ | 438 |
| NM_015355 | Hs.462732 | SUZ12 | Suppressor of zeste 12 | 5′-CCCGGAAATTTCCCGTCCC-3′ | 439 |
| | | | homolog | | |
| NM_015355 | Hs.462732 | SUZ12 | Suppressor of zeste 12 | 5′-GAGATGACCTGCATTGCCC-3′ | 440 |
| | | | homolog | | |
| NM_016179.1 | Hs.262960 | TRPC4 | Transient receptor potential | 5′-ACUCUUGGUUCAGAAAGGATT-3′ | 441 |
| | | | cation channel, subfamily C, | | |
| | | | member 4 | | |
| NM_000249 | Hs.195364 | MLH1 | MutL homolog 1, colon cancer, | 5′-GGTTCACTACTAGTAAACT-3′ | 442 |
| | | | nonpolyposis type 2 | | |
| NM_000534 | Hs.111749 | PMS1 | PMS1 postmeiotic segregation | 5′-GGAATCTACTCGTTTGTAT-3′ | 443 |
| | | | increased 1 | | |
| NM_002198 | Hs.436061 | IRF1 | Interferon regulatory factor 1 | 5′-CCAAGAACCAGAGAAAAGATT-3′ | 444 |
| NM_002199.2 | Hs.374097 | IRF2 | Interferon regulatory factor 2 | 5′-CUCUUUAGAAACUGGGCAATT-3′ | 445 |
| NM_000546.2 | Hs.408312 | TP53 | Tumor protein p53 (Li- | 5′-AAGACTCCAGTGGTAATCTAC-3′ | 446 |
| | | | Fraumeni syndrome) | | |
| NM_000051 | Hs.435561 | ATM | Ataxia telangiectasia mutated | 5′-TAGAGCTACAGAACGAAAG-3′ | 447 |
| | | | (includes complementation | | |
| | | | groups A, C and D) | | |
| NM_000051 | Hs.435561 | ATM | Ataxia telangiectasia mutated | 5′-GAATGTGAACACCACCAAA-3′ | 448 |
| | | | (includes complementation | | |
| | | | groups A, C and D) | | |
| NM_000051 | Hs.435561 | ATM | Ataxia telangiectasia mutated | 5′-CTACACAAATATTGAGGAT-3′ | 449 |
| | | | (includes complementation | | |
| | | | groups A, C and D) | | |
| NM_000051 | Hs.435561 | ATM | Ataxia telangiectasia mutated | 5′-CTGTACTTCCATACTTGAT-3′ | 450 |
| | | | (includes complementation | | |
| | | | groups A, C and D) | | |
| NM_001184 | Hs.271791 | ATR | Ataxia telangiectasia and Rad3 | 5′-AAGCCAAGACAAATTCTGTGT-3′ | 451 |
| | | | related | | |
| NM_001184 | Hs.271791 | ATR | Ataxia telangiectasia and Rad3 | 5′-AACCTCCGTGATGTTGCTTGA-3′ | 452 |
| | | | related | | |
| NM_001798.2 | Hs.19192 | CDK2 | Cyclin-dependent kinase 2 | 5′-CAAAGCCAGAAACAAGTTG-3′ | 453 |
| NM_001798.2 | Hs.19192 | CDK2 | Cyclin-dependent kinase 2 | 5′-AAATAAACTCTACCTGGTT-3′ | 454 |
| NM_001798.2 | Hs.19192 | CDK2 | Cyclin-dependent kinase 2 | 5′-AAACCTCAGAATCTGCTTA-3′ | 455 |
| NM_001798.2 | Hs.19192 | CDK2 | Cyclin-dependent kinase 2 | 5′-GTTACTTCTATGCCTGATT-3′ | 456 |
| NM_207003 | Hs.469658 | BCL2L11 | BCL2-like 11 (apoptosis | 5′-(GACCGAGAAGGUAGACAAUUG) | 457 |
| | | | facilitator) | d(TT)-3′ | |
| NM_000166 | Hs.333303 | GJB1 | Gap junction protein, beta 1, | 5′-AAGAGGCACAAGGTCCACATCdTdT-3′ | 458 |
| | | | 32 kDa | | |
| NM_000359 | Hs.508950 | TGM1 | Transglutaminase 1 | 5′-AUGCAGCUGGAGAUGGCACdTdT-3′ | 459 |
| NM_024596 | Hs.550532 | MCPH1 | Microcephaly, primary | 5′-AGGAAGUUGGAAGGAUCCAdTdT-3′ | 460 |
| | | | autosomal recessive 1 | | |
| NM_024596 | Hs.550532 | MCPH1 | Microcephaly, primary | 5′-GAACACUUAUCAAGCCUAAUU-3′ | 461 |
| | | | autosomal recessive 1 | | |
| NM_024596 | Hs.550532 | MCPH1 | Microcephaly, primary | 5′-GGAGAGAACAAGCAUAUUUUU-3′ | 462 |
| | | | autosomal recessive 1 | | |
| NM_024596 | Hs.550532 | MCPH1 | Microcephaly, primary | 5′-UGAUGUACCUAUUCUCUUAUU-3′ | 463 |
| | | | autosomal recessive 1 | | |
| NM_024596 | Hs.550532 | MCPH1 | Microcephaly, primary | 5′-GAUAAGAGAUUUCAGAAGAUU-3′ | 464 |
| | | | autosomal recessive 1 | | |
| NM_024596 | Hs.550532 | MCPH1 | Microcephaly, primary | 5′-GUCACCACAGCGCAATGGAdTdT-3′ | 465 |
| | | | autosomal recessive 1 | | |
| NM_000245 | Hs.132966 | MET | Met proto-oncogene | 5′-ACUCUAGAUGCUCAGACUUTT-3′ | 466 |
| | | | (hepatocyte growth factor | | |
| | | | receptor) | | |
| NM_205860.1 | Hs.33446 | NR5A2 | Nuclear receptor subfamily 5, | 5′-AGGATCCATCTTCCTGGTTAC-3′ | 467 |
| | | | group A, member 2 | | |
| NM_182763.1 | Hs.532826 | MCL1 | Myeloid cell leukemia | 5′-UAACACCAGTACGGACGGGdTdT-3′ | 468 |
| | | | sequence 1 (BCL2-related) | | |
| NM_008765 | Hs.444870 | ORC2L | Origin recognition complex, | 5′-UGCUCCUCUCAUGUGGGAU-3′ | 469 |
| | | | subunit 2-like | | |
| NM_006190 | Hs.444870 | ORC2L | Origin recognition complex, | 5′-UCAUUGGUCAGUUGUCAUC-3′ | 470 |
| | | | subunit 2-like | | |
| NM_181837 | Hs.410228 | ORC3L | Origin recognition complex, | 5′-GAGACUUGGGCGGUCAAAU-3′ | 471 |
| | | | subunit 3-like | | |
| NM_002592.2 | Hs.147433 | PCNA | Proliferating cell nuclear | 5′-CGGUGACACUCAGUAUGUC-3′ | 472 |
| | | | antigen | | |
| NM_016526 | Hs.414418 | BET1L | Blocked early in transport 1 | 5′-AAGCAUGACCAGCCUGCUUAC-3′ | 473 |
| | | | homolog (S. cerevisiae) like | | |
| NM_001569 | Hs.522819 | IRAK1 | Interleukin-1 receptor- | 5′-GGUUGUCCUUGAGUAAUAAtt-3′ | 474 |
| | | | associated kinase 1 | | |
| NM_080649 | Hs.73722 | APEX1 | APEX nuclease | 5′-GUCUGGUACGACUGGAGUACC-3′ | 475 |
| | | | (multifunctional DNA repair | | |
| | | | enzyme) 1 | | |
| NM_002658 | Hs.77274 | PLAU | Plasminogen activator, | 5′-AACATTCACTGGTGCAACTGC-3′ | 476 |
| | | | urokinase | | |
| NM_001654 | Hs.446641 | ARAF | V-raf murine sarcoma 3611 | 5′-AACAACATCTTCCTACATGAG-3′ | 477 |
| | | | viral oncogene homolog | | |
| NM_004333 | Hs.490366 | BRAF | V-raf murine sarcoma viral | 5′-AAAGAATTGGATCTGGATCAT-3′ | 478 |
| | | | oncogene homolog B1 | | |
| NM_002880 | Hs.159130 | RAF1 | V-raf-1 murine leukemia viral | 5′-AAUAGUUCAGCAGUUUGGCUA-3′ | 479 |
| | | | oncogene homolog 1 | | |
| NM_014314 | Hs.190622 | DDX58 | DEAD (Asp-Glu-Ala-Asp) box | 5′-GAATTTAAAACCAGAATTATC-3′ | 480 |
| | | | Polypeptide 58 | | |
| NM_000927.3 | Hs.489033 | ABCB1 | ATP-binding cassette, sub- | 5′-AAGCGAAGCAGTGGTTCAGGT-3′ | 481 |
| | | | family B (MDR/TAP), member 1 | | |
| NM_001753.3 | Hs.74034 | CAV1 | Caveolin 1, caveolae protein, | 5′-AGACGAGCUGAGCGAGAAGCA-3′ | 482 |
| | | | 22 kDa | | |
| NM_001753.3 | Hs.74034 | CAV1 | Caveolin 1, caveolae protein, | 5′-CAUCUACAAGCCCAACAACTT-3′ | 483 |
| | | | 22 kDa | | |
| NM_000389.2 | Hs.370771 | CDKN1A | Cyclin-dependent kinase | 5′-CUUCGACUUUGUCACCGAG-3′ | 484 |
| | | | inhibitor 1A (p21, Cip1) | | |
| NM_007294.1 | Hs.194143 | BRCA1 | Breast cancer 1, early onset | 5′-AACCTGTCTCCACAAAGTGTG-3′ | 485 |
| NM_002105 | Hs.477879 | H2AFX | H2A histone family, member X | 5′-CAA CAA GAA GAC GCG AAU | 486 |
| | | | | CdTdT-3′ | |
| NM_020382 | Hs.443735 | SET8 | PR/SET domain containing | 5′-AAUCGCCUAGGAAGACUGAUC-3′ | 487 |
| | | | protein 8 | | |
| NM_012331 | Hs.490981 | MSRA | Methionine sulfoxidc reductase A | 5′-CCCCUGUAGCGGCCAAACAUU-3′ | 488 |
| NM_012331 | Hs.490981 | MSRA | Methionine sulfoxide reductase A | 5′-CAAAGUACAAAGGAAUUUAUU-3′ | 489 |
| NM_012331 | Hs.490981 | MSRA | Methionine sulfoxide reductase A | 5′-CGGGAGGGACAGACUUUCUUU-3′ | 490 |
| NM_014554 | Hs.371957 | SENP1 | SUMO1/sentrin specific | 5′-GTGAACCACAACTCCGTATTC-3′ | 491 |
| | | | protease 1 | | |
| NM_002945 | Hs.461925 | RPA1 | Replication protein A1, 70 kDa | 5′-AACUGGUUGACGAAAGUGGUG-3′ | 492 |
| NM_001184 | Hs.271791 | ATR | Ataxia telangiectasia and Rad3 | 5′-AACCCGCGUUGGCGUGGUUGA-3′ | 493 |
| | | | related | | |
| NM_001430.3 | Hs.468410 | EPAS1 | Endothelial PAS domain | 5′-ACCAAUCCAGCACCCAUCCdTdT-3′ | 494 |
| | | | protein 1 | | |
| NM_001530.2 | Hs.509554 | HIF1A | Hypoxia-inducible factor 1, | 5′-CUGAUGACCAGCAACUUGAdTdT-3′ | 495 |
| | | | alpha subunit (basic helix-loop- | | |
| | | | helix transcription factor) | | |
| NM_021972 | Hs.68061 | SPHK1 | Sphingosine kinase 1 | 5′-GAGCUGCAAGGCCUUGCCCdTdT-3 | 496 |
| NM_002502 | Hs.73090 | NFKB2 | Nuclear factor of kappa light | 5′-CTCCTCCATTGTGGAACCCAAGG | 497 |
| | | | polypeptide gene enhancer in | AGC-3′ | |
| | | | B-cells 2 (p49/p100) | | |
| NM_016829 | Hs.380271 | OGG1 | 8-oxoguanine DNA | 5′-GUAUGGACACUGACUCAGAUU-3′ | 498 |
| | | | glycosylase | | |
| NM_016829 | Hs.380271 | OGG1 | 8-oxoguanine DNA | 5′-GUACUUCCAGCUAGAUGUUUU-3′ | 499 |
| | | | glycosylase | | |
| NM_006142 | Hs.523718 | SFN | Stratifin | 5′-GAGCGAAACCUGCUCUCAG-3′ | 500 |
| NM_006142 | Hs.523718 | SFN | Stratifin | 5′-GGGUGACUACUACCGCUAC-3′ | 501 |
| NM_006142 | Hs.523718 | SFN | Stratifin | 5′-AGACAGCACCCUCAUCAUG-3′ | 502 |
| NM_00615 | Hs.477693 | NCK1 | NCK adaptor protein 1 | 5′-GUCCUGGUGGC3AGUUCGATT-3′ | 503 |
| NM_00615 | Hs.477693 | NCK1 | NCK adaptor protein 1 | 5′-CGUCUCUAUGACCUCAACATT-3′ | 504 |
| NM_002422 | Hs.375129 | MMP3 | Matrix metalloproteinase 3 | 5′-AUGAAGAGUCUUCCAAUCCUU-3′ | 505 |
| | | | (stromelysin 1, progelatinase) | | |
| NM_000021.2 | Hs.3260 | PSEN1 | Presenilin 1 (Alzheimer | 5′-AAGGTCCACTTCGTATGCTGG-3′ | 506 |
| | | | disease 3) | | |
| NM_015331 | Hs.517249 | NCSTN | Nicastrin | 5′-AAGGGCAAGTTTCCCGTGCAG-3′ | 507 |
| NM_016022 | Hs.108408 | APH-1A | Anterior pharynx defective 1 | 5′-AAGAAGGCAGATGAGGGGTTA-3′ | 508 |
| | | | homolog A (C. elegans) | | |
| NM_172341 | Hs.534465 | PEN2 | Presenilin enhancer 2 homolog | 5′-AAUCAAAGGCUAUGUCUGGCG-3′ | 509 |
| | | | (C. elegans) | | |
| NM_020673 | Hs.529044 | RAB22A | RAB22A, member RAS | 5′-AAGGACUACGCCGACUCUAUU-3′ | 510 |
| | | | oncogene family | | |
| NM_001002814 | Hs.191179 | RAB11FIP1 | RAB11 family interacting | 5′-CGCCTCTTTCCCAGTCCATGT-3′ | 511 |
| | | | protein 1 (class I) | | |
| NM_015470 | Hs.24557 | RAB11FIP5 | RAB11 family inetracting | 5′-GAGCTGAGTGCTCAGGCTAAA-3′ | 512 |
| | | | protein 5 (class I) | | |
| NM_030791 | Hs.24678 | SGPP1 | Sphingosine-1-phosphate | 5′-AGUGGCCCGUUUCCAGCGGdTT-3′ | 513 |
| | | | phosphatase 1 | | |
| NM_005406 | Hs.306307 | ROCK1 | Rho-associated, coiled-coil | 5′-AAGGTGATTGGTAGAGGTGCA-3′ | 514 |
| | | | containing protein kinase 1 | | |
| NM_198437 | Hs.250822 | STK6 | Serine/threonine kinase 6 | 5′-AAGCACAAAAGCTTGTCTCCA-3′ | 515 |
| NM_006272 | Hs.422181 | S100B | S100 calcium binding protein, | 5′-GGAAUUCAUGGCCUUUGUU-3′ | 516 |
| | | | beta (neural) | | |
| NM_004219 | Hs.350966 | PTTG1 | Pituitary tumor-transforming 1 | 5′-GAU CUC AAG UUU CAA CAC | 517 |
| | | | | Ctt-3′ | |
| NM_004219 | Hs.350966 | PTTG1 | Pituitary tumor-transforming 1 | 5′-GUC UGU AAA GAC CAA GG | 518 |
| | | | | GAtt-3′ | |
| NM_001478.2 | Hs.159481 | GALGT | UDP-N-acetyl-alpha-D- | 5′-GGAGCAAGUAGUGGGGCUGdTdT-3′ | 519 |
| | | | galactosamine:(N- | | |
| | | | acetylneuraminyl)- | | |
| | | | galactosylglueosylceramide N- | | |
| | | | acetylgalactosaminyltransferase | | |
| NM_000657 | Hs.150749 | BCL2 | B-cell CLL/lymphoma 2 | 5′-GUACAUCCAUUAUAAGCUGTT-3′ | 520 |
| NM_032984 | Hs.368982 | CASP2 | Caspase 2, apoptosis-related | 5′-AACTTCCAGCTGGCATATAGGdTdT-3′ | 521 |
| | | | cysteine protease | | |
| NM_001228 | Hs.369736 | CASP8 | Caspase 8, apoptosis-related | 5′-AAGGGUCAUGCUCUAUCAGAUdTdT-3′ | 522 |
| | | | cysteine protease | | |
| NM_197967 | Hs.474150 | BID | BH3 interacting domain death | 5′-AAGAAGACAUCAUCCGGAAUAdTdT-3′ | 523 |
| | | | agonist | | |
| NM_001167 | Hs.356076 | BIRC4 | Baculoviral IAP repeat- | 5′-AAGGAGAUACCGUGCGGUGCUdTdT-3′ | 524 |
| | | | containing 4 | | |
| NM_002483 | Hs.466814 | CEACAM6 | Carcinoembryonic antigen- | 5′-CCGGACAGTTCCATGTATA-3′ | 525 |
| | | | related cell adhesion | | |
| | | | molecule 6 | | |
| NM_001008490 | Hs.285313 | KLF6 | Kruppel-like factor 6 | 5′-GGAGAAAAGCCUUACAGAUTT-3′ | 526 |
| NM_024309 | Hs.368551 | TNIP2 | TNFAIP3 interacting protein 2 | 5′-GUAUUUGGCCGCCGACGCAd(TT)-3′ | 527 |
| NM_001621 | Hs.171189 | AHR | Aryl hydrocarbon receptor | 5′-AAGACTGGAGAAAGTGGCATG-3′ | 528 |
| NM_001005845 | Hs.2442 | ADAM9 | A disintegrin and | 5′-AAUCACUGUGGAGACAUUUGCdTdT-3′ | 529 |
| | | | metalloproteinase domain 9 | | |
| | | | (meltrin gamma) | | |
| NM_001110 | Hs.172028 | ADAM10 | A disintegrin and | 5′-AAUGAAGAGGGACACUUCCCUdTdT-3′ | 530 |
| | | | metalloproteinase domain 10 | | |
| NM_021641 | Hs.386283 | ADAM12 | A disintegrin and | 5′-AACCUCGCUGCAAAGAAUGUGdTdT-3′ | 531 |
| | | | metalloproteinase domain 12 | | |
| NM_207196 | Hs.312098 | ADAM15 | A disintegrin and | 5′-AACUCCAUCUGUUCUCCUGACdTdT-3′ | 532 |
| | | | metalloproteinase domain 15 | | |
| | | | (metargidin) | | |
| NM_021832 | Hs.404914 | ADAM17 | A disintegrin and | 5′-AAAGUUUGCUUGGCACACCUUdTdT-3′ | 533 |
| | | | metalloproteinase domain 17 | | |
| NM_000927.3 | Hs.489033 | ABCB1 | ATP-binding cassette, sub- | 5′-AAG GCC TAA TGC CGA ACA | 534 |
| | | | family B (MDR/TAP), member 1 | CA-3′ | |
| NM_000927.3 | Hs.489033 | ABCB1 | ATP-binding cassette, sub- | 5′-AAC TTT GGC TGC CAT CAT | 535 |
| | | | family B (MDR/TAP), member 1 | CCA-3′ | |
| NM_000572 | Hs.193717 | IL10 | Interleukin 10 | 5′-UAAGCUCCAAGAGAAAGGCdTdT-3′ | 536 |
| NM_021975 | Hs.502875 | RELA | V-rel reticuloendotheliosis | 5′-GCCCUAUCCCUUUACGUCA-3′ | 537 |
| | | | viral oncogene homolog A | | |
| NM_001331 | Hs.166011 | CTNND1 | Catenin (cadherin-associated | 5′-GTGGACCATGCACTGCATGCCTAT | 538 |
| | | | protein), data 1 | AGTGAGTCGTATTAC-3′ | |
| NM_001211 | Hs.36708 | BUB1B | BUB1 budding uninhibited by | 5′- AGATCCTGGCTAACTGTTC-3′ | 539 |
| | | | benzimidazoles 1 homolog beta | | |
| NM_002358 | Hs.533185 | MAD2L1 | MAD2 mitotic arrest deficient- | 5′-TACGGACTCACCTTGCTTG-3′ | 540 |
| | | | like 1 (yeast) | | |
| NM_001530.2 | Hs.509554 | HIF1A | Hypoxia-inducible factor 1, | 5′-CUGGACACAGUGUGUUUGAdTdT-3′ | 541 |
| | | | alpha subunit | | |
| NM_001530.2 | Hs.509554 | HIF1A | Hypoxia-inducible factor 1, | 5′-CUGAUGACCAGCAACUUGAdTdT-3′ | 542 |
| | | | alpha subunit | | |
| NM_001430 | Hs.468410 | EPAS1 | Endothelial PAS domain | 5′-GCUCUUCGCCAUGGACACAdTdT-3′ | 543 |
| | | | protein 1 | | |
| NM_001430 | Hs.468410 | EPAS1 | Endothelial PAS domain | 5′-GCGACAGCUGGAGUAUGAAdTdT-3′ | 544 |
| | | | protein 1 | | |
| NM_001379 | Hs.202672 | DNMT1 | DNA (cytosine-5-)- | 5′-CCAUGAGCACCGUUCUCCTT-3′ | 545 |
| | | | methyltransferase 1 | | |
| NM_031310 | Hs.107125 | PLVAP | Plasmalemma vesicle | 5′-CUUGACCAAGGAGCUCAACTT-3′ | 546 |
| | | | associated protein | | |
| NM_031310 | Hs.107125 | PLVAP | Plasmalemma vesicle | 5′-GGAGCUCAACUUCACCACCTT-3′ | 547 |
| | | | associated protein | | |
| NM_016734 | Hs.126365 | PAX5 | Paired box gene 5 (B-cell | 5′-CGGCCACUCGCUUCCGGGCTT-3′ | 548 |
| | | | lineage specific activator) | | |
| NM_016734 | Hs.126365 | PAX5 | Paired box gene 5 (B-cell | 5′-GCUCCGUCGACUGCGCGCC-3′ | 549 |
| | | | lineage specific activator) | | |
| NM_006257 | Hs.498570 | PRKCQ | Protein kinase C, theta | 5′-AAACCACCGTGGAGCTCTACT-3′ | 550 |
| NM_006257 | Hs.498570 | PRKCQ | Protein kinase C, theta | 5′-AAGAGCCCGACCTTCTGTGAA-3′ | 551 |
| NM_032430 | Hs.182081 | BRSK1 | BR serine/threonine kinase 1 | 5′-GUU CUU CCG CCA GAU UGU | 552 |
| | | | | GdTdT-3′ | |
| NM_015045 | Hs.203099 | KIAA0261 | KIAA0261 | 5′-CGGACUACCCUUAGCACAAUU-3′ | 553 |
| NM_015045 | Hs.203099 | KIAA0261 | KIAA0261 | 5′-GAAUAGUCACCAUAUUCACUU-3′ | 554 |
| NM_005430 | Hs.248164 | WNT1 | Wingless-type MMTV | 5′-GGTTCCATCGAATCCTGCA-3′ | 555 |
| | | | integration site family, | | |
| | | | member 1 | | |
| NM_004421.2 | Hs.74375 | DVL1 | Dishevelled, dsh homolog 1 | 5′-AACAAGATCACCTTCTCCGAG-3′ | 556 |
| | | | (Drosophila) | | |
| NM_004422 | Hs.118640 | DVL2 | Dishevelled, dsh homolog 2 | 5′-AACTTTGAGAACATGAGCAAC-3′ | 557 |
| | | | (Drosophila) | | |
| NM_139049 | Hs.522924 | MAPK8 | Mitogen-activated protein | 5′-CGTGGATTTATGGTCTGTG-3′ | 558 |
| | | | kinase 8 | | |
| NM_003376 | Hs.73793 | VEGF | Vascular endothelial growth | 5′-UGGAUGUCUAUCAGCGCAGdTdT-3′ | 559 |
| | | | factor | | |
| NM_003376 | Hs.73793 | VEGF | Vascular endothelial growth | 5′-GCUACUGCCAUCCAAUCGAdTdT-3′ | 560 |
| | | | factor | | |
| NM_003376 | Hs.73793 | VEGF | Vascular endothelial growth | 5′-GGAGUACCCUGAUGAGAUCdTdT-3′ | 561 |
| | | | factor | | |
| NM_003376 | Hs.73793 | VEGF | Vascular endothelial growth | 5′-CUGAGGAGUCCAACAUCACdTdT-3′ | 562 |
| | | | factor | | |
| NM_003376 | Hs.73793 | VEGF | Vascular endothelial growth | 5′-CCAAGGCCAGCACAUAGGAdTdT-3′ | 563 |
| | | | factor | | |
| NM_005123 | Hs.282735 | NR1H4 | Nuclear receptor subfamily 1, | 5′-GTCGTGACTTGCGACAAG-3′ | 564 |
| | | | group H, member 4 | | |
| NM_004999 | Hs.149387 | MYO6 | Myosin VI | 5′-GCUGGCAGUUCAUAGGAAUdTdT-3′ | 565 |
| NM_004999 | Hs.149387 | MYO6 | Myosin VI | 5′-CGUGCUCCAAAGUCUGU1AdTdT-3′ | 566 |
| NM_014865 | Hs.5719 | CNAP1 | Chromosome condensation- | 5′-UCAGUAUGUUGUGCAAGAGTT-3′ | 567 |
| | | | related SMC-associated | | |
| | | | protein 1 | | |
| NM_014865 | Hs.5719 | CNAP1 | Chromosome condensation- | 5′-GAAGAUACUCUGGAAUUCCTT-3′ | 568 |
| | | | related SMC-associated | | |
| | | | protein 1 | | |
| NM_015261 | Hs.438550 | KIAA0056 | KIAA0056 protein | 5′-CUGGAUUUCACAGAGACUGTT-3′ | 569 |
| NM_015261 | Hs.438550 | KIAA0056 | KIAA0056 protein | 5′-GCAGAGAUCAUAGAGACUGTT-3′ | 570 |
| NM_015341 | Hs.308045 | BRRN1 | Barren homolog (Drosophila) | 5′-GACUUUCCUCAGAAUGACGTT-3′ | 571 |
| NM_015341 | Hs.308045 | BRRN1 | Barren homolog (Drosophila) | 5′-CAUUACUCCACCUGUAUCATT-3′ | 572 |
| NM_014551 | Hs.180903 | 384D8-2 | hypothetical protein 384D8_6 | 5′-GGAUUUCAGGAUGAACACGTT-3′ | 573 |
| NM_014551 | Hs.180903 | 384D8-2 | hypothetical protein 384D8_6 | 5′-GCUGCAGGACUUCCACCAGTT-3′ | 574 |
| NM_006031 | Hs.474069 | PCNT2 | Pericentrin 2 (kendrin) | 5′-AAUUGGAACAGCUGCAGCAGA-3′ | 575 |
| NM_006031 | Hs.474069 | PCNT2 | Pericentrin 2 (kendrin) | 5′-AAGCUCUGAUUUAUCAAAAGA-3′ | 576 |
| NM_012179.2 | Hs.5912 | FBXO7 | F-box protein 7 | 5′-CCCACACCAUUCCAUUCUA-3′ | 577 |
| NM_002467 | Hs.202453 | MYC | V-myc myelocytomatosis viral | 5′-AAGAUGAGGAAGAAAUCGAUGUU-3′ | 578 |
| | | | oncogene homolog (avian) | | |
| NM_002467 | Hs.202453 | MYC | V-myc myelocytomatosis viral | 5′-AAAAGGUCAGAGUCUGGAUCACC-3′ | 579 |
| | | | oncogene homolog (avian) | | |
| NM_002467 | Hs.202453 | MYC | V-myc myelocytomatosis viral | 5′-CACGUCUCCACACAUCAGCACAA-3′ | 580 |
| | | | oncogene homolog (avian) | | |
| NM_002467 | Hs.202453 | MYC | V-myc myelocytomatosis viral | 5′-AAAUGAGAUAAAGGUGGCUAAUU-3′ | 581 |
| | | | oncogene homolog (avian) | | |
| NM_002392 | Hs.369849 | MDM2 | Mdm2, transformed 3T3 cell | 5′-UGGUUGCAUUGUCCAUGGC-3′ | 582 |
| | | | double minute 2, p53 binding | | |
| | | | protein | | |
| NM_003121 | Hs.437905 | SPIB | Spi-B transcription factor | 5′-GATCGCTGTGTGTCTGTAA-3′ | 583 |
| | | | (Spi-1/PU.1 related) | | |
| NM_003120.1 | Hs.502511 | SPI1 | Spleen focus forming virus | 5′-GTCCGTATGTAAATCAGAT-3′ | 584 |
| | | | (SFFV) proviral integration | | |
| | | | oncogene spi1 | | |
| NM_199002 | Hs.278186 | ARHGEF1 | Rho guanine nucleotide | 5′-CATACCATCTCTACCGACG-3′ | 585 |
| | | | exchange factor (GEF) 1 | | |
| NM_014784 | Hs.516954 | ARHGEF11 | Rho guanine nucleotide | 5′-ACTGAAGTCTCGGCCAGCT-3′ | 586 |
| | | | exchange factor (GEF) 11 | | |
| NM_015313 | Hs.24598 | ARHGEF12 | Rho guanine nucleotide | 5′-GAAACTCGTCGCATCTTCC-3′ | 587 |
| | | | exchange factor (GEF) 12 | | |
| NM_173842 | Hs.81134 | IL1RN | Interleukin 1 receptor | 5′-AUCUGCAGAGGCCUCCGCAtt-3′ | 588 |
| | | | antagonist | | |
| NM_032726 | Hs.549218 | PLCD4 | Phospholipase C, delta 4 | 5′-GAGCAGAACCTTCAGAATAdTdT-3′ | 589 |
| NM_032726 | Hs.549218 | PLCD4 | Phospholipase C, delta 4 | 5′-GAGCAGGGCTTCACCATTGdTdT-3′ | 590 |
| NM_032726 | Hs.549218 | PLCD4 | Phospholipase C, delta 4 | 5′-GGAAGGAGAAGAATTCGTAdTdT-3′ | 591 |
| NM_032726 | Hs.549218 | PLCD4 | Phospholipase C, delta 4 | 5′-GATATCATCTTTCTCTGAAdTdT-3′ | 592 |
| NM_004104 | Hs.83190 | FASN | Fatty acid synthase | 5′-CAACTACGGCTTTGCCAAT-3′ | 593 |
| NM_004104 | Hs.83190 | FASN | Fatty acid synthase | 5′-GCAACTCACGCTCCGGAAA-3′ | 594 |
| NM_004104 | Hs.83190 | FASN | Fatty acid synthase | 5′-GCCCTGAGCTGGACTACTT-3′ | 595 |
| NM_004104 | Hs.83190 | FASN | Fatty acid synthase | 5′-GGTATGCGACGGGAAAGTA-3′ | 596 |
| NM_002165.2 | Hs.504609 | ID1 | Inhibitor of DNA binding 1, | 5′-AACTCGGAATCCGAAGTTGGA-3′ | 597 |
| | | | dominant negative helix-loop- | | |
| | | | helix protein | | |
| NM_003200.1 | Hs.371282 | TCF3 | Transcription factor 3 | 5′-AAAGACCTGAGGGACCGGGAG-3′ | 598 |
| NM_015895 | Hs.234896 | GMNN | Geminin, DNA replication | 5′-GAGAAAATGAGCTGTCCGC-3′ | 599 |
| | | | inhibitor | | |
| NM_015895 | Hs.234896 | GMNN | Geminin, DNA replication | 5′-CTGGCAGAAGTAGCAGAAC-3′ | 600 |
| | | | inhibitor | | |
| NM_006704 | Hs.281902 | SUGT1 | SGT1, suppressor of G2 allele | 5′-AAGGCUUUGGAACAGAAACCA-3′ | 601 |
| | | | of SKP1 (S. cerevisiae) | | |
| NM_002358 | Hs.533185 | MAD2L1 | MAD2 mitotic arrest deficient- | 5′-AAGAGUCGGGACCACAGUUUA-3′ | 602 |
| | | | like 1 | | |
| NM_006472 | Hs.533977 | TXNIP | Thioredoxin interacting | 5′-ACAGACUUCGGAGUACCUG1TT-3′ | 603 |
| | | | protein | | |
| NM_001379 | Hs.202672 | DNMT1 | DNA (cytosine-5-)- | 5′-CGGUGCUCAUGCUUACAACTT-3′ | 604 |
| | | | methyltransferase 1 | | |
| NM_001379 | Hs.202672 | DNMT1 | DNA (cytosine-5-)- | 5′-CGAGUUGCUAGACCGCUUCTT-3′ | 605 |
| | | | methyltransferase 1 | | |
| NM_006838 | Hs.444986 | METAP2 | Methionyl aminopeptidase 2 | 5′-AAUGCCGGUGACACAACAUGA-3′ | 606 |
| NM_007862.2 | Mm.382 | Dlgh1 | Discs, large homolog 1 | 5′-TACGGGAGCAGATGATGAAA-3′ | 607 |
| | | | (Drosophila) | | |
| NM_007862.2 | Mm.382 | Dlgh1 | Discs, large homolog 1 | 5′-AACCCAAATCCATGGAAAATA-3′ | 608 |
| | | | (Drosophila) | | |
| NM_008173.1 | Mm.129481 | Nr3c1 | Nuclear receptor subfamily 3, | 5′-GAGCAGTGGAAGGACAGCATTCAA | 609 |
| | | | group C, member 1 | GAGATGCTGTCCTTCCACTGCTCTTTT | |
| | | | | TT-3′ | |
| NM_008173.1 | Mm.129481 | Nr3c1 | Nuclear receptor subfamily 3, | 5′-GATCCCGAGCAGTGGAAGGACAGC | 610 |
| | | | group C, member 1 | ATTCAAGAGATGCTGTCCTTCCACTGC | |
| | | | | TCTTTTTTGGAAA-3′ | |
| NM_007871.1 | Mm.39292 | Dnm2 | Dynamin 2 | 5′-GGACCAGGCAGAGAATGAG-3′ | 611 |
| NM_011155.1 | Mm.3294 | Ppp5c | Protein phosphatase 5, | 5′-AAG ACA CAG GCC AAC GAC | 612 |
| | | | catalytic subunit | UAC-3′ | |
| NM_011155.1 | Mm.3294 | Ppp5c | Protein phosphatase 5, | 5′-AAG AUU GUG AAG CAG AAG | 613 |
| | | | catalytic subunit | GCC-3′ | |
| NM_009263.1 | Mm.288474 | Spp1 | Secreted phosphoprotein 1 | 5′-AATCTCCTTGCGCCACAGAAT-3′ | 614 |
| NM_009263.1 | Mm.288474 | Sppl | Secreted phosphoprotein 1 | 5′-AAGTCAGCTGGATGAACCAAG-3′ | 615 |
| NM_145978.1 | Mm.283968 | Pdlim2 | PDZ and LIM domain 2 | 5′-AAGAUCCGACAGAGCGC05CA-3′ | 616 |
| NM_146386.1 | Mm.32257 | Myocd | Myocardin | 5′-AATGCAACTGCAGAAGCAGAA-3′ | 617 |
| NM_145541.3 | Mm.333868 | Rap1a | RAS-related protein-1a | 5′-AAGCAAGTCGAGGTAGATTGC-3′ | 618 |
| NM_010026.1 | Mm.277236 | Ddef1 | RIKEN cDNA 1700010G06 | 5′-CAGCUAACUGCACUCCGAG-3′ | 619 |
| | | | gene | | |
| NM_010026.1 | Mm.277236 | Ddef1 | RIKEN cDNA 1700010G06 | 5′-UGAUAUUAUGGAAGCAAAU-3′ | 620 |
| | | | gene | | |
| NM_007614.2 | Mm.291928 | Catnb | Catenin beta | 5′-AAGGCTTTTCCCAGTCCTTCA-3′ | 621 |
| NM_007614.2 | Mm.291928 | Catnb | Catenin beta | 5′-AAGATGATGGTGTGCCAAGTG-3′ | 622 |
| NM_011952.1 | Mm.8385 | Mapk3 | Mitogen activated protein | 5′-AATGTTATAGGCATCCGAGAC-3′ | 623 |
| | | | kinase 3 | | |
| NM_011952.1 | Mm.8385 | Mapk3 | Mitogen activated protein | 5′-AACCCAAACAAGCGCATCACA-3′ | 624 |
| | | | kinase 3 | | |
| NM_011949.2 | Mm.196581 | Mapk1 | Mitogen activated protein | 5′-AAAGTTCGAGTTGCTATCAAG-3′ | 625 |
| | | | kinase 1 | | |
| NM_010591.1 | Mm.275071 | Jun | Jun oncogene | 5′-GCGCATGAGGAACCGCATT-3′ | 626 |
| NM_008416.1 | Mm.1167 | Junb | Jun-B oncogene | 5′-GACCAGGAGCGCATCAAAG-3′ | 627 |
| NM_010592.3 | Mm.1175 | Jund1 | Jun proto-oncogene related | 5′-AAGCCAGAACACCGAGCTG-3′ | 628 |
| | | | gene d1 | | |
| NM_010234.2 | Mm.246513 | Fos | FBJ osteosarcoma related | 5′-GCGGAGACAGATCAACTTG-3′ | 629 |
| | | | oncogene | | |
| NM_010235.1 | Mm.6215 | Fosl1 | Fos-like antigen 1 | 5′-ATTGGAGGATGAGAAATCG-3′ | 630 |
| NM_008037.3 | Mm.24684 | Fosl2 | Fos-like antigen 2 | 5′-TCAACGCCATCACCACCAG-3′ | 631 |
| NM_009505.2 | Mm.282184 | Vegfa | Vascular endothelial growth | 5′-AACGAUGAAGCCCUGGAGUGC-3′ | 632 |
| | | | factor A | | |
| NM_015774.2 | Mm.264435 | Ero11 | ERO1-like (S. cerevisiae) | 5′-ACTTCATCAGAATGGCAGGGTTT-3′ | 633 |
| NM_021450.1 | Mm.244705 | Trpm7 | Transient receptor potential | 5′-AACCGGAGGTCAGGTCGAAAT-3′ | 634 |
| | | | cation channel, subfamily M, | | |
| | | | member 7 | | |
| NM_021450.1 | Mm.244705 | Trpm7 | Transient receptor potential | 5′-AAGCAGAGTGACCTGGTAGAT-3 | 635 |
| | | | cation channel, subfamily M, | | |
| | | | member 7 | | |
| NM_177407.2 | Mm.131530 | Camk2a | Calcium/calmodulin-dependent | 5′-CACCACCAUUGAGGACGAAdTdT-3′ | 636 |
| | | | protein kinase II alpha | | |
| NM_010118.1 | Mm.290421 | Egr2 | Early growth response 2 | 5′-GUGACCACCUUACUACUCAdTdT-3′ | 637 |
| NM_010118.1 | Mm.290421 | Egr2 | Early growth response 2 | 5′-GUUUGCCAGGAGUGACGAAdTdT-3′ | 638 |
| NM_015806.2 | Mm.18856 | Mapk6 | Mitogen-activated protein | 5′-GGCUUUUCAUGUAUCAGCUTT-3′ | 639 |
| | | | kinase 6 | | |
| NM_015806.2 | Mm.18856 | Mapk6 | Mitogen-activated protein | 5′-GGCAAUGGCUUGGUUUUUUTT-3′ | 640 |
| | | | kinase 6 | | |
| NM_015806.2 | Mm.18856 | Mapk6 | Mitogen-activated protein | 5′-GGAGUACAUGGAGACAGACTT-3′ | 641 |
| | | | kinase 6 | | |
| NM_009744.2 | Mm.347398 | Bcl6 | B-cell leukemia/lymphoma 6 | 5′-GTCGAGACATCTTGACTGA-3′ | 642 |
| NM_009744.2 | Mm.347398 | Bcl6 | B-cell leukemia/lymphoma 6 | 5′-GACACGGATCTGAGAATCT-3′ | 643 |
| NM_145533.1 | Mm.136586 | Smox | Spermine oxidase | 5′-GGACGUGGUUGAGGAAUUC-3′ | 644 |
| NM_008778.1 | Mm.40035 | Pak3 | P21 (CDKN1A)-activated | 5′-TAGCAGCACATCAGTCGAATA-3′ | 645 |
| | | | kinase 3 | | |
| NM_008778.1 | Mm.40035 | Pak3 | P21 (CDKN1A)-activated | 5′-CCCAATATTGTCAATTATTTA-3′ | 646 |
| | | | kinase 3 | | |
| NM_080428.2 | Mm.196475 | Fbxw7 | F-box and WD-40 domain | 5′-CACAAAGCTGGTGTGTGCA-3′ | 647 |
| | | | protein 7, archipelago homolog | | |
| NM_021450.1 | Mm.244705 | Trpm7 | Transient receptor potential | 5′-AACCGGAGGTCAGGTCGAAAT-3′ | 648 |
| | | | cation channel, subfamily M, | | |
| | | | member 7 | | |
| NM_021450.1 | Mm.244705 | Trpm7 | Transient receptor potential | 5′-AAGCAGAGTGACCTGGTAGAT-3′ | 649 |
| | | | cation channel, subfamily M, | | |
| | | | member 7 | | |
| NM_009505.2 | Mm.282184 | Vegfa | Vascular endothelial growth | 5′-AAGCCGTCCTGTGTGCCGCTG-3′ | 650 |
| | | | factor A | | |
| NM_009505.2 | Mm.282184 | Vegfa | Vascular endothelial growth | 5′-AACGATGAAGCCCTGGAGTGC-3′ | 651 |
| | | | factor A | | |
| NM_010228.2 | Mm.3464 | Flt1 | FMS-like tyrosine kinase 1 | 5′-AAGTTAAAAGTGCCTGAACTG-3′ | 652 |
| NM_010228.2 | Mm.3464 | Flt1 | FMS-like tyrosine kinase 1 | 5′-AAGCAGGCCAGACTCTCTTTC-3′ | 653 |
| NM_010612.2 | Mm.285 | Kdr | Kinase insert domain protein | 5′-AAGCTCAGCACACAGAAAGAC-3′ | 654 |
| | | | receptor | | |
| NM_010612.2 | Mm.285 | Kdr | Kinase insert domain protein | 5′-AATGCGGCGGTGGTGACAGTA-3′ | 655 |
| | | | receptor | | |
| AK019429.1 | Mm.3049 | Cks1b | CDC28 protein kinase 1b | 5′-GGGACATAGCCAAGCTGGTCgagt | 656 |
| | | | | actgGACCAGCTTGGCTATGTCC-3′ | |
| NM_008000.1 | Mm.280819 | Fert2 | Fer (fms/fps related) protein | 5′-AAC TAC GGT TGC TGG AGA | 657 |
| | | | kinase, testis specific 2 | CAG-3′ | |
| NM_009750.1 | Mm.90787 | Ngfrap1 | Nerve growth factor receptor | 5′-CAACAACCACAACCATAAC-3′ | 658 |
| | | | (TNFRSF16) associated | | |
| | | | protein 1 | | |
| NM_009750.1 | Mm.90787 | Ngfrap1 | Nerve growth factor receptor | 5′-CATAACCACAACCACCACTdTdT-3′ | 659 |
| | | | (TNFRSF16) associated | | |
| | | | protein 1 | | |
| NM_010431.1 | Mm.3879 | Hif1a | Hypoxia inducible factor 1, | 5′-TGTGAGCTCACATCTTGAT-3′ | 660 |
| | | | alpha subunit | | |
| NM_010838 | Mm.1287 | Mapt | Microtubule-associated protein | 5′-CCAGGAGTTTGACACAATG-3′ | 661 |
| | | | tau | | |
| NM_009045 | Mm.2499661 | Rela | V-rel reticuloendotheliosis | 5′-GATCAATGGCTACACAGGA-3′ | 662 |
| | | | viral oncogene homolog A | | |
| NM_009689 | Mm.8552 | Birc5 | Baculoviral IAP repeat- | 5′-GAGCCAAGAACAAAATTGC-3′ | 663 |
| | | | containing 5 | | |
| NM_009689 | Mm.8552 | Birc5 | Baculoviral IAP repeat- | 5′-GAAAGTGCGCCGTGCCATC-3′ | 664 |
| | | | containing 5 | | |
| NM_007798.1 | Mm.236553 | CTSB | Cathepsin B | 5′-CCACUGUGGCAUUGAAUCATT-3′ | 665 |
| NM_011960 | Mm.15962 | Parg | Poly (ADP-ribose) | 5′-AACGCCACCTCGTTTGTTTTC-3′ | 666 |
| | | | glycohydrolase | | |
| NM_010928.1 | Mm.254017 | Notch2 | Notch gene homolog 2 | 5′-GAUGUGGACAGUGUCUGUTT-3′ | 667 |
| NM_019984 | Mm.41964 | Tgm1 | Transglutaminase 1, K | 5′-AUGCAGCUGGAGAUGGCACdTdT-3′ | 668 |
| | | | polypeptide | | |
| NM_009593 | Mm.15691 | Abcg1 | ATP-binding cassette, sub- | 5′-CGTGGATGAGGTTGAGACA-3′ | 669 |
| | | | family G (WHITE), member 1 | | |
| NM_009593 | Mm.15691 | Abcg1 | ATP-binding cassette, sub- | 5′-GGTGGACAACAACTTCACA-3′ | 670 |
| | | | family G (WHITE), member 1 | | |
| NM_138955 | Mm.101876 | Abcg4 | ATP-binding cassette, sub- | 5′-GAAGGTGGAGAACCATATC-3′ | 671 |
| | | | family G (WHITE), member 4 | | |
| NM_138955 | Mm.101876 | Abcg4 | ATP-binding cassette, sub- | 5′-GCACTTGAACTACTGGTAT-3′ | 672 |
| | | | family G (WHITE), member 4 | | |
| NM_011658 | Mm.3280 | Twist1 | Twist gene homolog 1 | 5′-AAGCTGAGCAAGATTCAGACC-3′ | 673 |
| NM_011658 | Mm.3280 | Twist1 | Twist gene homolog 1 | 5′-AGGTACATCGACTTCCTGTAC-3′ | 674 |
| NM_011658 | Mm.3280 | Twist1 | Twist gene homolog 1 | 5′-AGCGGGTCATGGCTAACGTGC-3′ | 675 |
| NM_009537 | Mm.3868 | Yy1 | YY1 transcription factor | 5′-GGGAGCAGAAGCAGGUGCAGAU-3′ | 676 |
| NM_172689 | Mm.86382 | Ddx58 | DEAD (Asp-Glu-Ala-Asp) box | 5′-GCCCATTGAAACCAAGAAATT-3′ | 677 |
| | | | polypeptide 58 | | |
| NM_008500.1 | Mm.12881 | Lhx6 | LIM homeobox protein 6 | 5′-AGACGCAGAGGCCTTGGTTCAAGAGA | 678 |
| | | | | CCAAGGCCTCTGCGTCTGACTTTTTC-3′ | |
| NM_009308 | Mm.233846 | Syt4 | Synaptotagmin 4 | 5′-r(GAAGCACAGAGUGAAGACCA) | 679 |
| | | | | d(TT)-3′ | |
| NM_009308 | Mm.233846 | Syt4 | Synaptotagmin 4 | 5′-r(CGAGCAGGAGAACAGCGAG) | 680 |
| | | | | d(TT)-3′ | |
| NM_007615.1 | Mm.35738 | Catns | Expressed sequence AI225934 | 5′-GATGGTTATCCAGGTGGCA-3′ | 681 |
| NM_007614.2 | Mm.291928 | Catnb | Catenin beta | 5′-CUGUUGUGGUUAAACUCCUTT-3′ | 682 |
| NM_011232 | Mm.38376 | Rad1 | RAD1 homolog (S. pombe) | 5′-GCCTTGACAACGTTAGGAATC-3′ | 683 |
| NM_011232 | Mm.38376 | Rad1 | RAD1 homolog (S. pombe) | 5′-GCAGGAAGTTCCCACCTTGAC-3′ | 684 |
| NM_011232 | Mm.38376 | Rad1 | RAD1 homolog (S. pombe) | 5′-GCCTGATGAAGAAGTTCC-3′ | 685 |
| NM_010423 | Mm.29581 | Hcy1 | Hairy/enhancer-of-split | 5′-GCTAGAAAAAGCTGAGATC-3′ | 686 |
| | | | related with YRPW motif 1 | | |
| NM_010133 | Mm.2657 | En1 | Engrailed 1 | 5′-CAUCCUAAGGCCCGAUUUCTT-3′ | 687 |
| NM_010133 | Mm.2657 | En1 | Engrailed 1 | 5′-GUUCCCGGAACACAACCCUTT-3′ | 688 |
| NM_019390 | Mm.243014 | Lmna | Lamin A | 5′-GCAGCUUCAGGAUGAGAUGTT-3′ | 689 |
| NM_183355.1 | Mm.43358 | Pbx1 | Pre B-cell leukemia | 5′-CAGUUUUGAGUAUUCGGGGTT-3′ | 690 |
| | | | transcription factor 1 | | |
| NM_007430 | Mm.5180 | Nr0b1 | Nuclear receptor subfamily 0, | 5′-GAUCACCUGCACUUCGAGdTdT-3′ | 691 |
| | | | group B, member 1 | | |
| NM_007430 | Mm.5180 | Nr0b1 | Nuclear receptor subfamily 0, | 5′-CUGAACAGUGCCCUUUUCCdTdT-3′ | 692 |
| | | | group B, member 1 | | |
| NM_172203 | Mm.233865 | Nox1 | NADPH oxidase 1 | 5′-TTATGAGAAGTCTGACAAG-3′ | 693 |
| NM_172203 | Mm.233865 | Nox1 | NADPH oxidase 1 | 5′-GATTCTTGGCTAAATCCCA-3′ | 694 |
| NM_172203 | Mm.233865 | Nox1 | NADPH oxidase 1 | 5′-GGACATTTGAACAACAGCA-3′ | 695 |
| NM_080850 | Mm.253287 | Pask | PAS domain containing | 5′-AATTTATGGAGTCAACCACAGCTT-3′ | 696 |
| | | | serine/threonine kinase | | |
| NM_009330 | Mm.7226 | Tcf2 | Transcription factor 2 | 5′-GCCGGUUUUCCAUACUCUCtt-3′ | 697 |
| NM_009330 | Mm.7226 | Tcf2 | Transcription factor 2 | 5′-CAAGAAGAUGCGCCGCAACtt-3′ | 698 |
| NM_009330 | Mm.7226 | Tcf2 | Transcription factor 2 | 5′-UGGUGGUCACAGAUACCAGtt-3′ | 699 |
| NM_024148.1 | Rn.5949 | Apex1 | Apurinic/apyrimidinic | 5′-GUCUGGUAAGACUGGAGUACC-3′ | 700 |
| | | | endonuclease 1 | | |
| NM_017059.1 | Rn.10668 | Bax | Bcl2-associated X protein | 5′-UUGGAGAUGAACUGGACAAUU-3′ | 701 |
| NM_017059.1 | Rn.10668 | Bax | Bcl2-associated X protein | 5′-CUG GAC AAU AAU AUG GAG | 702 |
| | | | | CUU-3′ | |
| NM_023979.1 | Rn.64522 | Apaf1 | Apoptotic protease activating | 5′-AGA ACU UUG UGC UUU AAU | 703 |
| | | | factor 1 | GUU-3′ | |
| NM_023979.1 | Rn.64522 | Apaf1 | Apoptotic protease activating | 5′-UAU AGG CAU AUA CUG GAU | 704 |
| | | | factor 1 | GUU-3′ | |
| NM_021835.2 | Rn.93714 | Jun | V-jun sarcoma virus 17 | 5′-AGU GAA AAC CUU GAA AGC | 705 |
| | | | oncogene homolog (avian) | GUU-3′ | |
| NM_021835.2 | Rn.93714 | Jun | V-jun sarcoma virus 17 | 5′-AGU CAU GAA CCA CGU UAA | 706 |
| | | | oncogene homolog (avian) | CUU-3′ | |
| NM_012655.1 | Rn.44609 | Sp1 | Sp1 transcription factor | AATGAGAACAGCAACAACTCC | 707 |
| XM_230974.2 | Rn.102138 | Sp3 | Sp3 transcription factor | AAGTTCTCAGACAATGACTGC | 708 |
| NM_133551.1 | Rn.10162 | Pla2g4a | Phospholipase A2, group IVA | 5′-TCGAGACAGTAGTGGTTCTACGTG | 709 |
| | | | (cytosolic, calcium-dependent) | CCgagtactgGGCACGTAGAACCACTA | |
| | | | | CTGTTTTTT-3′ | |
| NM_001003959.1 | Rn.117353 | Dnmt3b | DNA methyltransferase 3B | 5′-AGAUGACAGGUGCCCAGAGUU-3′ | 710 |
| NM_019335.1 | Rn.10022 | Prkr | Protein kinase, interferon- | 5′-GGUAGAUCAAAGCAGGAGGTT-3′ | 711 |
| | | | inducible double stranded RNA | | |
| | | | dependent | | |
| NM_053622.1 | Rn.10474 | Pom121 | Nuclear pore membrane | 5′-AACGGAGUCCCUGCUGCAUUU | 712 |
| | | | glycoprotein 121 kD | dTdT-3′ | |
| NM_053622.1 | Rn.10474 | Pom121 | Nuclear pore membrane | 5′-AACCAUGUCACCAGUCCAGUU | 713 |
| | | | glycoprotein 121 kD | dTdT-3′ | |
| NM_053622.1 | Rn.10474 | Pom121 | Nuclear pore membrane | 5′-AAGCCUGUGUUUGGCUUUGGA | 714 |
| | | | glycoprotein 121 kD | dTdT-3′ | |
| NM_131907.2 | Rn.5805 | Atp2c1 | ATPase, Ca++-sequestering | 5′-AACCATTATGGAAGAAGTACATT-3′ | 715 |
| NM_031337.1 | Rn.22706 | Siar9 | Sialyltransferase 9 | 5′-GGGUUAUUCUGAACAUGUUtt-3′ | 716 |
| NM_031010.2 | Rn.11318 | Alox15 | Arachidonate 12-lipoxygenase | 5′-GCAACTGGATTTCTGTGAAGG-3′ | 717 |
| NM_031010.2 | Rn.11318 | Alox15 | Arachidonate 12-lipoxygenase | 5′-GAAGCGGATTTCTTCCTTCTG-3′ | 718 |
| NM_031556.1 | Rn.22518 | Cav | Caveolin | 5′-AAGGAGATCGACCTGGTCAAC-3′ | 719 |
| NM_031556.1 | Rn.22518 | Cav | Caveolin | 5′-AAGGGACACACAGTTTTGACG-3′ | 720 |
| XM_232106.2 | Rn.117974 | Dok-1 | Docking protein 1 (predicted) | 5′-GAACTACACAAATTCAGCCAGGCG | 721 |
| | | | | TATCATCCGGTGTTTCGTCCTTTCCAC | |
| | | | | AAG-3′ | |
| NM_133307.1 | Rn.98279 | Prkcd | Protein kinase C, delta | 5′-AAAAGGCAAATTCACAAACAGCCT | 722 |
| | | | | GTCTC-3′ | |
| NM_133307.1 | Rn.98279 | Prkcd | Protein kinase C, delta | 5′-AAGTTCTCCGAAGTGTGAGAACCT | 723 |
| | | | | GTCTC-3′ | |
| NM_012637.1 | Rn.11317 | Ptpn1 | Protein tyrosine phosphatase, | 5′-AAGCTGACACTGATCTCTGAA-3′ | 724 |
| | | | non-receptor type 1 | | |
| NM_017212 | Rn.2455 | Mapt | Microtubule-associated protein | 5′-CCAGGAGTTTGACACAATG-3′ | 725 |
| | | | tau | | |
| NM_013156 | Rn.1294 | CTSL | Cathepsin L | 5′-GGACAGAUGUUCCUUAAGATT-3′ | 726 |
| NM_012576.1 | Rn.90070 | Nr3c1 | Nuclear receptor subfamily 3, | 5′-GGCCAAGGGAGGGGGAGCGTA-3′ | 727 |
| | | | group C, member 1 | | |
| NM_013131.1 | Rn.9678 | Nr3c2 | Nuclear receptor subfamily 3, | 5′-GGCGCTGGAGTCAAGTGTCTC-3′ | 728 |
| | | | group C, member 2 | | |
| NM_031659 | Rn.10039 | Tgm1 | Transglutaminase 1 | 5′-AUGCAGCUGGAGAUGGCACdTdT-3′ | 729 |
| NM_019275 | Rn.9774 | Madh4 | MAD homolog 4 | 5′-AAUACACCGACAAGCAAUGACdTdT-3′ | 730 |
| NM_031132 | Rn.9954 | Tgfbr2 | Transforming growth factor, | 5′-AAAGUCGGUUAACAGCGAUCUdTdT-3′ | 731 |
| | | | beta receptor II | | |
| NM_144741 | Rn.16746 | Retn | Resistin | 5′-CCTTTCATTTCTCCTCCTT-3′ | 732 |
| NM_144741 | Rn.16746 | Retn | Resistin | 5′-AGCTGCTCCTGTGGCTCTG-3′ | 733 |
| NM_144741 | Rn.16746 | Retn | Resistin | 5′-GCCTCCTGCCCAGAAGGCA-3′ | 734 |
| NM_012614 | Rn.9714 | Npy | Neuropeptide Y | 5′-UGAGAGAAAGCACAGAAA-3′ | 735 |
| NM_021597 | Rn.35512 | Eif2c2 | GERp95 | 5′-UGGACAUCCCCAAAAUUGA-3′ | 736 |
| NM_012547 | Rn.87299 | Drd2 | Dopamine receptor 2 | 5′-CCCCAUCAUCUACACCACA-3′ | 737 |

### APPENDIX (B)

TABLE 1
Oligonucleotide Stimulation of Mouse B Cells

| ODN | | | Stimulation Index′ | |
|---|---|---|---|---|
| Production | | Sequence (5′ to 3′) | ³H Uridine | IgM |
| 1 | (SEQ ID NO: 1) | GCTAGACGTTAGCGT | 6.1 ± 0.8 | 17.9 ± 3.6 |
| 1a | (SEQ ID NO: 2) | ......T........ | 1.2 ± 0.2 | 1.7 ± 0.5 |
| 1b | (SEQ ID NO: 3) | ......Z........ | 1.2 ± 0.1 | 1.8 ± 0.0 |
| 1c | (SEQ ID NO: 4) | ............Z.. | 10.3 ± 4.4 | 9.5 ± 1.8 |
| 1d | (SEQ ID NO: 5) | ..AT.......GAGC. | 13.0 ± 2.3 | 18.3 ± 7.5 |
| 2 | (SEQ ID NO: 6) | ATGGAAGGTCCAGCGTTCTC | 2.9 ± 0.2 | 13.6 ± 2.0 |
| 2a | (SEQ ID NO: 7) | ..C..CTC..G......... | 7.7 ± 0.8 | 24.2 ± 3.2 |
| 2b | (SEQ ID NO: 8) | ..Z..CTC.ZG..Z...... | 1.6 ± 0.5 | 2.8 ± 2.2 |
| 2c | (SEQ ID NO: 9) | ..Z..CTC..G......... | 3.1 ± 0.6 | 7.3 ± 1.4 |
| 2d | (SEQ ID NO: 10) | ..C..CTC..G......Z.. | 7.4 ± 1.4 | 27.7 ± 5.4 |
| 2e | (SEQ ID NO: 11) | ............A....... | 5.6 ± 2.0 | ND |
| 3D | (SEQ ID NO: 12) | GAGAACGCTGGACCTTCCAT | 4.9 ± 0.5 | 19.9 ± 3.6 |
| 3Da | (SEQ ID NO: 13) | .........C.......... | 6.6 ± 1.5 | 33.9 ± 6.8 |
| 3Db | (SEQ ID NO: 14) | .........C.......G.. | 10.1 ± 2.8 | 25.4 ± 0.8 |
| 3Dc | (SEQ ID NO: 15) | ...C.A.............. | 1.0 ± 0.1 | 1.2 ± 0.5 |
| 3Dd | (SEQ ID NO: 17) | .....Z.............. | 1.2 ± 0.2 | 1.0 ± 0.4 |
| 3De | (SEQ ID NO: 12) | .............Z...... | 4.4 ± 1.2 | 18.8 ± 4.4 |
| 3Df | (SEQ ID NO: 18) | .......A............ | 1.6 ± 0.1 | 7.7 ± 0.4 |
| 3Dg | (SEQ ID NO: 19) | .........CC.G.ACTG.. | 6.1 ± 1.5 | 18.6 ± 1.5 |
| 3M | (SEQ ID NO: 22) | TCCATGTCGGTCCTGATGCT | 4.1 ± 0.2 | 23.2 ± 4.9 |
| 3Ma | (SEQ ID NO: 21) | ......CT............ | 0.9 ± 0.1 | 1.8 ± 0.5 |
| 3Mb | (SEQ ID NO: 22) | .......Z............ | 1.3 ± 0.3 | 1.5 ± 0.6 |
| 3Mc | (SEQ ID NO: 23) | ...........Z........ | 5.4 ± 1.5 | 8.5 ± 2.6 |
| 3Md | (SEQ ID NO: 24) | ......A..T.......... | 17.2 ± 9.4 | ND |
| 3Me | (SEQ ID NO: 741) | ...............C..A. | 3.6 ± 0.2 | 14.2 ± 5.2 |

| | | | |
|---|---|---|---|
| 4 | TCAACGTT (SEQ ID NO: | 6.1 ± 1.4 | 19.2 ± 5.2 |
| | 26) | | |
| 4a | ....GC.. (SEQ ID NO: | 1.1 ± 0.2 | 1.5 ± 1.1 |
| | 27) | | |
| 4b | ...GCGC. (SEQ ID NO: | 4.5 ± 0.2 | 9.6 ± 3.4 |
| | 28) | | |
| 4c | ...TCGA. (SEQ ID NO: | 2.7 ± 1.0 | ND |
| | 2306) | | |
| 4d | ..TT..AA (SEQ ID NO: | 1.3 ± 0.2 | ND |
| | 30) | | |
| 4e | ........ (SEQ ID NO: | 1.3 ± 0.2 | 1.1 ± 0.5 |
| | 31) | | |
| 4f | C....... (SEQ ID NO: | 3.9 ± 1.4 | ND |
| | 32) | | |
| 4g | --......CT (SEQ ID | 1.4 ± 0.3 | ND |
| | NO: 2307) | | |
| 4h | .......C (SEQ ID NO: | 1.2 ± 0.2 | ND |
| | 34) | | |
| LPS | | 7.8 ± 2.8 | 4.8 ± 1.0 |

′Stimulation indexes are the means and std. dev. derived from at least 3 separate experiments, and are compared to wells cultured with no added ODN.
ND = not done.
CpG dinucleotides are underlined.
Dots indicate identity; dashes indicate deletion.
Z indicates 5 methyl cytonine.

TABLE 2
Identification of the optimal CpG motif for Nurine IL-6 production and B cell activation.

| | | | IL-6 (pg/ml)^{a} | | | |
|---|---|---|---|---|---|---|
| ODN | | | | SPLENIC | | |
| (ng/ml)^{C} | SEQUENCE (5′-3′) | | CH12.LX | B CELL | SI^{b} | IgM |
| 512 | (SEQ ID No: 22) | TCCATGTCGGTCCTGATGCT | 1300 ± 106 | 627 ± 43 | 5.8 ± 0.3 | 7315 ± 1324 |
| 1637 | (SEQ ID No: 43) | ......C............. | 136 ± 27 | 46 ± 6 | 1.7 ± 0.2 | 770 ± 72 |
| 1615 | (SEQ ID No: 44) | ......G............. | 1201 ± 155 | 850 ± 202 | 3.7 ± 0.3 | 3212 ± 617 |
| 1614 | (SEQ ID No: 45) | ......A............. | 1533 ± 321 | 1812 ± 103 | 10.8 ± 0.6 | 7558 ± 414 |
| 1636 | (SEQ ID No: 46) | .........A.......... | 1181 ± 76 | 947 ± 132 | 5.4 ± 0.4 | 3983 ± 485 |
| 1634 | (SEQ ID No: 47) | .........C.......... | 1049 ± 223 | 1671 ± 175 | 9.2 ± 0.9 | 6256 ± 261 |
| 1619 | (SEQ ID No: 48) | .........T.......... | 1555 ± 304 | 2908 ± 129 | 12.5 ± 1.0 | 8243 ± 698 |
| 1618 | (SEQ ID No: 24) | ......A..T.......... | 2109 ± 291 | 2596 ± 166 | 12.9 ± 0.7 | 10425 ± 674 |
| 1639 | (SEQ ID No: 49) | .....AA..T.......... | 1827 ± 83 | 2012 ± 132 | 11.5 ± 0.4 | 9439 ± 103 |
| 1707 | (SEQ ID No: 50) | ......A..TC......... | ND | 1147 ± 175 | 4.0 ± 0.2 | 3534 ± 217 |
| 1708 | (SEQ ID No: 51) | .....CA..TG......... | ND | 59 ± 3 | 1.5 ± 0.1 | 466 ± 109 |

Dots indicate identity;
CpG dinucleotides are underlined;
ND = not done.
The experiment was done at least three times with similar results. The level of IL-6 of unstimulated control cultures of both CH.2.LX and splenic B cells was ≤ 10 pg/ml. The IgM level of unstimulated culture was 547 ± 82 ng/ml. CpG dinucleotides are underlined and dots indicate identity.
^{b}[³H] Uridine uptake was indicated as a fold increase (SI: stimulation index) from unstimulated control (2322.67 ± 213.68 cpm). Cells were stimulated with 20 μM of various CpG O-QDN.
Data present the mean ± SD of triplicates
Measured by ELISA.

TABLE 3
Induction of Murine IL-6 secretion by CpG motifs
in bacterial DNA or oligonucleotides.

| Treatment | | | | IL-6 (pg/ml) |
|---|---|---|---|---|
| calf thymus DNA | | | | ≤10 |
| calf thymus DNA + DNase | | | | ≤10 |
| E. coli DNA | | | | 1169.5 ± 94.1 |
| E. coli DNA + DNase | | | | ≤10 |
| CpG methylated E. coli DNA | | | | ≤10 |
| LPS | | | | 280.1 ± 17.1 |
| Media (no DNA) | | | | ≤10 |
| ODN | 5a | SEQ. | ATGGACTCTCCAGCGTTCTC | 1096.4 ± 372.0 |
| | | ID | | |
| | | No: 35 | | |
| | 5b | SEQ. | .....AGG....A....... | 1124.5 ± 126.2 |
| | | ID | | |
| | | No: | | |
| | | 740 | | |
| | 5c | SEQ. | ..C.......G......... | 1783.0 ± 189.5 |
| | | ID | | |
| | | No: 7 | | |
| | 5d | SEQ. | .... AGG..C..T...... | ≤10 |
| | | ID | | |
| | | No: | | |
| | | 4742 | | |
| | 5e | SEQ. | ..C.......G..Z...... | 851.1 ± 114.4 |
| | | ID | | |
| | | No: 8 | | |
| | 5f | SEQ. | ..Z......ZG..Z...... | ≤10 |
| | | ID | | |
| | | No: 9 | | |
| | 5g | SEQ. | ..C.......G......Z.. | 1862.3 ± 87.26 |
| | | ID | | |
| | | No: 10 | | |

TABLE 5
Induction of human PBMC cytokine secrtetion by CpG oligos

| ODN | Sequence (5′-3′) | IL-6¹ | TNF-α¹ | IFN-γ¹ | GM-CSF | IL-12 |
|---|---|---|---|---|---|---|
| 512 | TCCATGTCGGTCCTGATGCT | 500 | 140 | 15.6 | 70 | 250 |
| SEQ ID NO: 22 | | | | | | |
| 1637 | ......C............. | 550 | 16 | 7.8 | 15.6 | 35 |
| SEQ ID NO: 43 | | | | | | |
| 1615 | ......G............. | 600 | 145 | 7.8 | 45 | 250 |
| SEQ ID NO: 44 | | | | | | |
| 1645 | ......A............. | 550 | 31 | 0 | 50 | 250 |
| (SEQ ID NO: 45) | | | | | | |
| 1636 | .........A.......... | 325 | 250 | 35 | 40 | 0 |
| SEQ ID NO: 46 | | | | | | |
| 1634 | .........C.......... | 300 | 400 | 40 | 85 | 200 |
| SEQ ID NO: 47 | | | | | | |
| 1619 | .........T.......... | 275 | 450 | 200 | 80 | ≥500 |
| SEQ ID NO: 48 | | | | | | |
| 1618 | ......A..T.......... | 300 | 60 | 15.6 | 15.6 | 62 |
| SEQ ID NO: 24 | | | | | | |
| 1639 | .....AA..T.......... | 625 | 220 | 15.6 | 40 | 60 |
| SEQ ID NO: 49 | | | | | | |
| 1707 | ......A..TC......... | 300 | 70 | 17 | 0 | 0 |
| SEQ ID NO: 50 | | | | | | |
| 1708 | .....CA..TG......... | 270 | 10 | 17 | 0 | 0 |
| SEQ ID NO: 51 | | | | | | |

TABLE 9
Induction of NK Activity by DNA Containing CpG Motifs but not
by Non-CpG DNA

| | LU/10⁶ | |
|---|---|---|
| DNA or Cytokine Added | Mouse Cells | Human cells |

| | | | |
|---|---|---|---|
| Expt. 1 | None | 0.00 | 0.00 |
| | IL-2 | 16.68 | 15.82 |
| | E. Coli, DNA | 7.23 | 5.05 |
| | Calf thymus DNA | 0.00 | 0.00 |
| Expt. 2 | None | 0.00 | 3.28 |
| | 1585 ggGGGGTCAACGTTGAGGGGGGgggg (SEQ ID No. 743) | 7.38 | 17.98 |
| | 1629 ----------gtc------------- (SEQ ID No. 744) | 0.00 | 4.4 |
| Expt. 3 | 1613 GCTAGACGTTAGTGT (SEQ ID No. 54) | 5.22 | |
| | 1769 -------Z------- (SEQ ID No. 745) | 0.02 | ND |
| | 1619 TCCATGTCGTTCCTGATGCT (SEQ ID No: 48) | 3.35 | |
| | 1765 -------Z------------ (SEQ ID No. 56) | 0.11 | |

TABLE 10
Different CpG motifs stimulate optima
murine B cell and NK activation

| | | B cell | NK |
|---|---|---|---|
| ODN | Sequence | activation¹ | activation² |
| 1668 | TCCATGACGTTCCTGATGCT | 42,849 | 2.52 |
| | (SEQ. ID. NO: 24) | | |
| 1758 | TCTCCCAGCGTGCGCCAT | 1,747 | 6.66 |
| | (SEQ. ID. NO. 59) | | |
| NONE | | 367 | 0.00 |

CpG dinucleotides are underlined; oligonucleotides were synthesized with phosphorothioate modified backbones to improve their nuclease resistance.
1Measured by ³H thymidine incorporation after 48 hr culture with oligodeoxynucleotides at a 200 nM concentration as described in Example 1.
²Measured in lytic units.

TABLE 1

| | | | |
|---|---|---|---|
| ODN Number | cells/ml × 10⁴ | PMN/ml × 10³ | % PMN |

expt 1, C3H/BFe, 1 mice

| | | | |
|---|---|---|---|
| 1908 | 61.4 ± 15.9 | 59.2 ± 15.7 | 95.8 ± 0.95 |
| 1760 | 27.8 ± 3.5* | 25.8 ± 3.0* | 93.3 ± 2.3 |
| 1631 | 47.6 ± 11.1 | 46.1 ± 10.7 | 96.8 ± 1.11 |
| 1835 | 43.8 ± 7.1 | 44.4 ± 7.1 | 96.8 ± 0.75 |
| 1759 | 71.0 ± 19.8 | 67.7 ± 20.4 | 96.8 ± 2.6 |
| 1826 | 39.8 ± 7.8 | 38.3 ± 7.9 | 93.5 ± 1.4 |
| None (saline) | 71.0 ± 7.4 | 69.3 ± 6.9 | 97.8 ± 1.3 |

expt 2, C57 Bl/6 mice

| | | | |
|---|---|---|---|
| 1908 | 18.0 ± 2.6 | 16.6 ± 2.7 | 91.2 ± 3.7 |
| 1760 | 10.2 ± 2.3* | 8.6 ± 2.1* | 82.0 ± 3.0 |
| 1585 | 11.0 ± 2.2* | 9.5 ± 2.2* | 84.6 ± 2.9 |
| 2010 | 14.1 ± 2.1 | 11.8 ± 1.9 | 83.4 ± 2.1 |
| None (saline) | 17.9 ± 3.4 | 16.9 ± 2.1 | |

expt 3

| | | | |
|---|---|---|---|
| 1908 | 19.0 ± 2.5 | 16.9 ± 2.1 | 89.4 ± 1.4 |
| 1760 | 9.1 ± 0.8* | 7.7 ± 0.7* | 84.6 ± 0.5 |
| 1972 | 15.3 ± 1.6 | 13.5 ± 1.4 | 84.2 ± 1.2 |
| 2001 | 13.0 ± 1.6* | 11.8 ± 1.6 | 90.4 ± 2.2 |

*P > 0.05, Mean-Whitney U test

TABLE 2
Induction Of NK Activity By CpG Oligodeoxynucleotides (ODN)

| | % YAC-1 Specific Lysis* | | % 2C11 Specific Lysis | |
|---|---|---|---|---|
| | Effector:Target | | Effector:Target | |
| ODN | 50:1 | 100:1 | 50:1 | 100:1 |
| None | −1.1 | −1.4 | 15.3 | 16.6 |
| 1 | 16.1 | 24.5 | 38.7 | 47.2 |
| 3Dd | 17.1 | 27.0 | 37.0 | 40.0 |
| non-CpG | −1.6 | −1.7 | 14.8 | 15.4 |
| ODN | | | | |

TABLE 3
Induction of NK Activity by DNA
Containing CpG Motifs but not by Non-CpG DNA

| | | LU/10⁶ | |
|---|---|---|---|
| | DNA or Cytokine Added | Human Cells | Mouse Cells |
| Expt. 1 | None | 0.00 | 0.00 |
| | IL-2 | 16.68 | 15.82 |
| | E. Coli DNA | 7.23 | 5.05 |
| | Calf thymus DNA | 0.00 | 0.00 |
| Expt. 2 | None | 0.00 | 3.28 |
| | 1585 ggGGTCAACGTTGACgggg (SEQ ID NO: 746) | 7.38 | 17.98 |
| | 1629 --------gtc-------- (SEQ ID NO: 747) | 0.00 | 4.4 |
| Expt. 3 | None | 0.00 | |
| | 1613 GCTAGACGTTAGTGT (SEQ ID NO: 54) | 5.22 | |
| | 1769 -------X----- (SEQ ID NO: 745) | 0.02 | ND |
| | 1619 TCCATGTCGTTCCTGATGCT (SEQ ID NO: 48) | 3.35 | |
| | 1765 --------X----------- (SEQ ID NO: 748) | 0.11 | |

CpG dinucleotides in ODN sequences are indicated by underlining;
X indicates methylcytosine.
Lower case letters indicate nuclease resistant phosphorothioate modified internucleotide linkages which, in titration experiments, were more than 20 times as potent as non-modified ODN, depending on the flanking bases.
Poly G ends (g) were used in some ODN, because they significantly increase the level of ODN uptake.
Dashes indicate some bases are identical to those in the directly preceding sequence, with the exception of changes noted.

TABLE 4
ODN induction of NK Lytic Activity (LU)

| ODN | Sequence (5′-3′) | LU |
|---|---|---|
| None | | 0.01 |
| 1754 | ACCATGGACGATCTGTTTCCCCTC | 0.02 |
| | (SEQ ID NO: 58) | |
| 1758 | TCTCCCAGCGTGCGCCAT | 0.05 |
| | (SEQ ID NO: 59) | |
| 1761 | TACCGCGTGCGACCCTCT | 0.05 |
| | (SEQ ID NO: 60) | |
| 1776 | ACCATGGACGAACTGTTTCCCCTC | 0.03 |
| | (SEQ ID NO: 61) | |
| 1777 | ACCATGGACGAGCTGTTTCCCCTC | 0.05 |
| | (SEQ ID NO: 62) | |
| 1778 | ACCATGGACGACCTGTTTCCCCTC | 0.01 |
| | (SEQ ID NO: 63) | |
| 1779 | ACCATGGACGTACTGTTTCCCCTC | 0.02 |
| | (SEQ ID NO: 64) | |
| 1780 | ACCATGGACGGTCTGTTTCCCCTC | 0.29 |
| | (SEQ ID NO: 65) | |
| 1781 | ACCATGGACGTTCTGTTTCCCCTC | 0.38 |
| | (SEQ ID NO: 66) | |
| 1823 | GCATGACGTTGAGCT | 0.08 |
| | (SEQ ID NO: 41) | |
| 1824 | CACGTTGAGGGGCAT | 0.01 |
| | (SEQ ID NO: 67) | |
| 1825 | CTGCTGAGACTGGAG | 0.01 |
| | (SEQ ID NO: 68) | |
| 1828 | TCAGCGTGCGCC | 0.01 |
| | (SEQ ID NO: 69) | |
| 1829 | ATGACGTTCCTGACGTT | 0.42 |
| | (SEQ ID NO: 70) | |
| 1830₂ | RANDOM SEQUENCE | 0.25 |
| 1834 | TCTCCCAGCGGGCGCAT | 0.00 |
| | (SEQ ID NO: 71) | |
| 1836 | TCTCCCAGCGCGCGCCAT | 0.46 |
| | (SEQ ID NO: 72) | |
| 1840 | TCCATGTCGTTCCTGTCGTT | 2.7 |
| | (SEQ ID NO: 73) | |
| 1841 | TCCATAGCGTTCCTAGCGTT | 1.45 |
| | (SEQ ID NO: 74) | |
| 1842 | TCGTCGCTGTCTCCGCTTCTT | 0.06 |
| | (SEQ ID NO: 75) | |
| 1851 | TCCTGACGTTCCTGACGTT | 2.32 |
| | (SEQ ID NO: 76) | |

₁Lytic units (LU) were measured as described (8). Briefly, PBMC were collected from normal donors and spun over Ficoll, then cultured with or without the indicated ODN (which were added to cultures at 6 μg/ml) for 24 hr. Then their ability to lyse ⁵¹Cr-labeled K562 cells was determined. The results shown are typical of those obtained with several different normal human donors.
₂This oligo mixture contained a random selection of all 4 bases at each position.

TABLE 5
Induction of NK LU by Phoshorothioate CpG
ODN with Good Motifs

| ODN₁ | sequence (5′-3′ | expt. 1 | expt. 2 | expt. 3 |
|---|---|---|---|---|
| None | | 0.00 | 1.26 | 0.46 |
| 1840 | TCCATGTCGTTCCTGTCGTT (SEQ ID NO: 73) | 2.33 | ND | ND |
| 1960 | TCCTGTCGTTCCTGTCGTT (SEQ ID NO: 77) | ND | 0.48 | 8.99 |
| 1961 | TCCATGTCGTTTTTGTCGTT (SEQ ID NO: 78) | 4.03 | 1.23 | 5.08 |
| 1962 | TCCTGTCGTTCCTTGTCGTT (SEQ ID NO: 79) | ND | 1.60 | 5.74 |
| 1963 | TCCTTGTCGTTCCTGTCGTT (SEQ ID NO: 80) | 3.42 | ND | ND |
| 1965 | TCCTGTCGTTTTTTGTCGTT (SEQ ID NO: 81) | 0.46 | 0.42 | 3.48 |
| 1966 | TCGTCGCTGTCTCCGCTTCTT (SEQ ID NO: 75) | 2.62 | ND | ND |
| 1967 | TCGTCGCTGTCTGCCCTTCTT (SEQ ID NO: 82) | 5.82 | 1.64 | 8.32 |
| 1968 | TCGTCGCTGTTGTCGTTTCTT (SEQ ID NO: 83) | 3.77 | 5.26 | 6.12 |
| 1979₂ | TCCATGTZGTTCCTGTZGTT (SEQ ID NO: 84) | 1.32 | ND | ND |
| 1982 | TCCAGGACTTCTCTCAGGTT (SEQ ID NO: 85) | 0.05 | ND | 0.98 |
| 1990 | TCCATGCGTGCGTGCGTTTT (SEQ ID NO: 86) | 2.10 | ND | ND |
| 1991 | TCCATGCGTTGCGTTGCGTT (SEQ ID NO: 87) | 0.89 | ND | ND |
| 2002 | TCCACGACGTTTTCGACGTT (SEQ ID NO: 88) | 4.02 | 1.31 | 9.79 |
| 2005 | TCGTCGTTGTCGTTGTCGTT (SEQ ID NO: 89) | ND | 4.22 | 12.75 |
| 2006 | TCGTCGTTTTGTCGTTTTGTCGTT (SEQ ID NO: 90) | ND | 6.17 | 12.82 |
| 2007 | TCGTCGTTGTCGTTTTGTCGTT (SEQ ID NO: 91) | ND | 2.68 | 9.66 |
| 2008 | GCGTGCGTTGTCGTTGTCGTT (SEQ ID NO: 92) | ND | 1.37 | 8.15 |
| 2010 | GCGGCGGGCGGCGCGCGCCC (SEQ ID NO: 93) | ND | 0.01 | 0.05 |
| 2012 | TGTCGTTTGTCGTTTGTCGTT (SEQ ID NO: 94) | ND | 2.02 | 11.61 |
| 2013 | TGTCGTTGTCGTTGTCGTTGTCGTT (SEQ ID NO: 95) | ND | 0.56 | 5.22 |
| 2014 | TGTCGTTGTCGTTGTCGTT (SEQ ID NO: 96) | ND | 5.74 | 10.89 |
| 2015 | TCGTCGTCGTCGTT (SEQ ID NO: 97) | ND | 4.53 | 10.13 |
| 2016 | TGTCGTTGTCGTT (SEQ ID NO: 98) | ND | 6.54 | 8.06 |

₁PBMC essentially as described herein. Results are representative of 6 separate experiments; each experiment represents a different donor.
₂This is the methylated version of ODN 1840; Z = 5-methyl cytosine LU is lytic units; ND = not done; CpG dinucleotides are underlined for clarity.

TABLE 6
Induction of human B cell proliferation by Phosphorothioate CpG ODN

| | | Stimulation Index¹ | | | | | |
|---|---|---|---|---|---|---|---|
| | | expt. | | | | | |
| DN | sequence (5′-3′) | 1 | expt. 2 | expt. 3 | expt. 4 | expt. 5 | expt. 6 |
| 1840 | TCCATGTCGTTCCTGTCGTT (SEQ ID NO: 84) | 4 | ND | ND | ND | ND | 34 |
| 1841 | TCCATAGCGTTCCTAGCGTT (SEQ ID NO: 99) | 3 | ND | ND | ND | ND | ND |
| 1960 | TCCTGTCGTTCCTGTCGTT (SEQ ID NO: 77) | ND | 2.0 | 2.0 | 3.6 | ND | ND |
| 1961 | TCCATGTCGTTTTTGTCGTT (SEQ ID NO: 78) | 2 | 3.9 | 1.9 | 3.7 | ND | 37 |
| 1962 | TCCTGTCGTTCCTTGTCGTT (SEQ ID NO: 79) | ND | 3.8 | 1.9 | 3.9 | 5.4 | 35 |
| 1963 | TCCTTGTCGTTCCTGTCGTT (SEQ ID NO: 80) | 3 | ND | ND | ND | ND | ND |
| 1965 | TCCTGTCGTTTTTTGTCGTT (SEQ ID NO: 81) | 4 | 3.7 | 2.4 | 4.7 | 6.0 | 43 |
| 1967 | TCGTCGCTGTCTGCCCTTCTT (SEQ ID NO: 82) | ND | 4.4 | 2.0 | 4.5 | 5.0 | 36 |
| 1968 | TCGTCGCTGTTGTCGTTTCTT (SEQ ID NO: 83) | ND | 4.0 | 2.0 | 4.9 | 8.7 | 38 |
| 1982 | TCCAGGACTTCTCTCAGGTT (SEQ ID NO: 85) | 3 | 1.8 | 1.3 | 3.1 | 3.2 | 12 |
| 2002 | TCCACGACGTTTTCGACGTT (SEQ ID NO: 88) | ND | 2.7 | 1.4 | 4.4 | ND | 14 |
| 2005 | TCGTCGTTGTCGTTGTCGTT (SEQ ID NO: 89) | 5 | 3.2 | 1.2 | 3.0 | 7.9 | 37 |
| 2006 | TCGTCGTTTTGTCGTTTTGTCGTT (SEQ ID NO: 90) | 4 | 4.5 | 2.2 | 5.8 | 8.3 | 40 |
| 2007 | TCGTCGTTGTCGTTTTGTCGTT (SEQ ID NO: 91) | 3 | 4.0 | 4.2 | 4.1 | ND | 22 |
| 2008 | GCGTGCGTTGTCGTTGTCGTT (SEQ ID NO: 92) | ND | 3.0 | 2.4 | 1.6 | ND | 12 |
| 2010 | GCGGCGGGCGGCGCGCGCCC (SEQ ID NO: 93) | ND | 1.6 | 1.9 | 3.2 | ND | ND |
| 2012 | TGTCGTTTGTCGTTTGTCGTT (SEQ ID NO: 94) | 2 | 2.8 | 0 | 3.2 | ND | 33 |
| 2013 | TGTCGTTGTCGTTGTCGTTGTCGTT (SEQ ID NO: 95) | 3 | 2.3 | 3.1 | 2.8 | ND | 7 |
| 2014 | TGTCGTTGTCGTTGTCGTT (SEQ ID NO: 96) | 3 | 2.5 | 4.0 | 3.2 | 6.7 | 14 |
| 2015 | TCGTCGTCGTCGTT (SEQ ID NO: 97) | 5 | 1.8 | 2.6 | 4.5 | 9.4 | 1 |
| 2016 | TGTCGTTGTCGTT (SEQ ID NO: 98) | ND | 1.1 | 1.7 | 2.7 | 7.3 | 1 |

¹Cells = human spleen cells stored at −70° C. after surgical harvest or PBMC collected from normal donors and spun over Ficoll. Cells were cultured in 96 well U-bottom microtiter plates with or without the indicated ODN (which were added to cultures at 6 μml). N = 12 experiments. Cells were cultured for 4-7 days, pulsed with 1 μCi of ³H thymidine for 18 hr before harvest and scintillation counting. Stimulation index = the ratio of cpm in wells without ODN to that in wells that had been stimulated throughout the culture period with the indicated ODN (there were no further additions of ODN after the cultures were set up). ND = not done

TABLE 7
Induction of human IL-12
secretion by Phosphorothioate CpG ODN

| | | IL-12 (pg/ml) | |
|---|---|---|---|
| ODN | sequence (5′-3′) | expt. 1 | expt. 2 |
| None | | 0 | 0 |
| 1962 | TCCTGTCGTTCCTTGTCGTT | 19 | 0 |
| | (SEQ ID NO: 79) | | |
| 1965 | TCCTGTCGTTTTTTGTCGTT | 36 | 0 |
| | (SEQ ID NO: 81) | | |
| 1967 | TCGTCGCTGTCTGCCCTTCTT | 41 | 0 |
| | (SEQ ID NO: 82) | | |
| 1968 | TCGTCGCTGTTGTCGTTTCTT | 24 | 0 |
| | (SEQ ID NO: 83) | | |
| 2005 | TCGTCGTTGTCGTTGTCGTT | 25 | 0 |
| | (SEQ ID NO: 89) | | |
| 2006 | TCGTCGTTTTGTCGTTTTGTCGTT | 29 | 15 |
| | (SEQ ID NO: 90) | | |
| 2014 | TGTCGTTGTCGTTGTCGTT | 28 | 0 |
| | (SEQ ID NO: 96) | | |
| 2015 | TCGTCGTCGTCGTT | 14 | 0 |
| | (SEQ ID NO: 97) | | |
| 2016 | TGTCGTTGTCGTT | 3 | 0 |
| | (SEQ ID NO: 98) | | |

₁PBMC were collected from normal donors and spun over Ficoll, then cultured at 10⁶ cells/well in 96 well microtiter plates with or without the indicated ODN which were added to cultures at 6 μg/ml. Supernatants were collected at 24 hr and tested for IL-12 levels by ELISA as described in methods. A standard curve was run in each experiment, which represents a different donor.

TABLE 8
Different CpG motifs stimulate optimal murine
B cell and NK activation

| | | B cell | NK |
|---|---|---|---|
| ODN | Sequence | activation¹ | activation² |
| 1668 | TCCATGACGTTCCTGATGCT | 42,849 | 2.52 |
| | (SEQ ID NO: 24) | | |
| 1758 | TCTCCCAGCGTGCGCCAT | 1,747 | 6.66 |
| | (SEQ ID NO: 59) | | |
| NONE | | 367 | 0.00 |

CpG dinucleotides are underlined;
oligonucleotides were synthesized with phosphorothioate modified backbones to improve their nuclease resistance.
¹Measured by ³H thymidine incorporation after 48 hr culture with oligodeoxy-nucleotides at a 200 nM concentration as described in Example 1.
²Measured in lytic units.

TABLE 1
sequences

| | |
|---|---|
| GCTAGACGTTAGCGT | (SEQ ID NO: 1) |
| GCTAGATGTTAGCGT | (SEQ ID NO: 2) |
| GCTAGAZGTTAGCGT | (SEQ ID NO: 3) |
| GCTAGACGTTAGZGT | (SEQ ID NO: 4) |
| GCATGACGTTGAGCT | (SEQ ID NO: 5) |
| ATGGAAGGTCCAGCGTTCTC | (SEQ ID NO: 6) |
| ATCGACTCTCGAGCGTTCTC | (SEQ ID NO: 7) |
| ATZGACTCTZGAGZGTTCTC | (SEQ ID NO: 8) |
| ATZGACTCTCGAGCGTTCTC | (SEQ ID NO: 9) |
| ATCGACTCTCGAGCGTTZTC | (SEQ ID NO: 10) |
| ATCGACTCTCGAACGTTCTC | (SEQ ID NO: 11) |
| GAGAACGCTGGACCTTCCAT | (SEQ ID NO: 12) |
| GAGAACGCTCGACCTTCCAT | (SEQ ID NO: 13) |
| GAGAACGCTCGACCTTCGAT | (SEQ ID NO: 14) |
| GAGCAAGCTGGACCTTCCAT | (SEQ ID NO: 15) |
| GAGCAZGCTGGACCTTCCAT | (SEQ ID NO: 16) |
| GAGAACGCTGGACZTTCCAT | (SEQ ID NO: 17) |
| GAGAACGATGGACCTTCCAT | (SEQ ID NO: 18) |
| TCCATGTZGTTCCTGATGCT | (SEQ ID NO: 57) |
| ACCATGGACGATCTGTTTCCCCTC | (SEQ ID NO: 58) |
| TCTCCCAGCGTGCGCCAT | (SEQ ID NO: 59) |
| TACCGCGTGCGACCCTCT | (SEQ ID NO: 60) |
| ACCATGGACGAACTGTTTCCCCTC | (SEQ ID NO: 61) |
| ACCATGGACGAGCTGTTTCCCCTC | (SEQ ID NO: 62) |
| ACCATGGACGACCTGTTTCCCCTC | (SEQ ID NO: 63) |
| ACCATGGACGTACTGTTTCCCCTC | (SEQ ID NO: 64) |
| ACCATGGACGGTCTGTTTCCCCTC | (SEQ ID NO: 65) |
| ACCATGGACGTTCTGTTTCCCCTC | (SEQ ID NO: 66) |
| CACGTTGAGGGGCAT | (SEQ ID NO: 67) |
| CTGCTGAGACTGGAG | (SEQ ID NO: 68) |
| TCAGCGTGCGCC | (SEQ ID NO: 69) |
| ATGACGTTCCTGACGTT | (SEQ ID NO: 70) |
| TCTCCCAGCGGGCGCAT | (SEQ ID NO: 71) |
| TCTCCCAGCGCGCGCCAT | (SEQ ID NO: 72) |
| TCCATGTCGTTCCTGTCGTT | (SEQ ID NO: 73) |
| TCCATAGCGTTCCTAGCGTT | (SEQ ID NO: 74) |
| TCGTCGCTGTCTCCGCTTCTT | (SEQ ID NO: 75) |
| TCCTGACGTTCCTGACGTT | (SEQ ID NO: 76) |
| TCCTGTCGTTCCTGTCGTT | (SEQ ID NO: 77) |
| TCCATGTCGTTTTTGTCGTT | (SEQ ID NO: 78) |
| TCCTGTCGTTCCTTGTCGTT | (SEQ ID NO: 79) |
| TCCTTGTCGTTCCTGTCGTT | (SEQ ID NO: 80) |
| TCCTGTCGTTTTTTGTCGTT | (SEQ ID NO: 81) |
| TCGTCGCTGTCTGCCCTTCTT | (SEQ ID NO: 82) |
| TCGTCGCTGTTGTCGTTTCTT | (SEQ ID NO: 83) |
| TCCATGTZGTTCCTGTZGTT | (SEQ ID NO: 84) |
| TCCAGGACTTCTCTCAGGTT | (SEQ ID NO: 85) |
| TCCATGCGTGCGTGCGTTTT | (SEQ ID NO: 86) |
| TCCATGCGTTGCGTTGCGTT | (SEQ ID NO: 87) |
| TCCACGACGTTTTCGACGTT | (SEQ ID NO: 88) |
| TCGTCGTTGTCGTTGTCGTT | (SEQ ID NO: 89) |
| TCGTCGTTTTGTCGTTTTGTCGTT | (SEQ ID NO: 90) |
| TCGTCGTTGTCGTTTTGTCGTT | (SEQ ID NO: 91) |
| GCGTGCGTTGTCGTTGTCGTT | (SEQ ID NO: 92) |
| GCGGCGGGCGGCGCGCGCCC | (SEQ ID NO: 93) |
| TGTCGTTTGTCGTTTGTCGTT | (SEQ ID NO: 94) |
| TGTCGTTGTCGTTGTCGTTGTCGTT | (SEQ ID NO: 95) |
| TGTCGTTGTCGTTGTCGTT | (SEQ ID NO: 96) |
| TCGTCGTCGTCGTT | (SEQ ID NO: 97) |
| TGTCGTTGTCGTT | (SEQ ID NO: 98) |
| TCCATAGCGTTCCTAGCGTT | (SEQ ID NO: 99) |
| TCCATGACGTTCCTGACGTT | (SEQ ID NO: 100) |
| GTCG(T/C)T | (SEQ ID NO: 101) |
| TGTCG(T/C)T | (SEQ ID NO: 102) |
| TCCATGAGCTTCCTGAGTCT | (SEQ ID NO: 103) |
| TCTCCCAGCGTGCGCCAT | (SEQ ID NO: 104) |
| TCCATGACGTTCCTGACGTT | (SEQ ID NO: 105) |

TABLE 2
Induction of human IL-12 secretion by
Phosphorothioate CpG oliqonucleotide

| | | IL-12 (pg/ml) | |
|---|---|---|---|
| ODN₁ | sequence (5′-3′) | expt. 1 | expt. 2 |
| None | | 0 | 0 |
| 1962 | TCCTGTCGTTCCTTGTCGTT | 19 | 0 |
| | (SEQ. ID NO: 79) | | |
| 1965 | TCCTGTCGTTTTTTGTCGTT | 36 | 0 |
| | (SEQ. ID NO: 81) | | |
| 1967 | TCGTCGCTGTCTGCCCTTCTT | 41 | 0 |
| | (SEQ. ID NO: 82) | | |
| 1968 | TCGTCGCTGTTGTCGTTTCTT | 24 | 0 |
| | (SEQ. ID NO: 83) | | |
| 2005 | TCGTCGTTGTCGTTGTCGTT | 25 | 0 |
| | (SEQ. ID NO: 89) | | |
| 2006 | TCGTCGTTTTGTCGTTTTGTCGTT | 29 | 15 |
| | (SEQ ID NO: 90) | | |
| 2014 | TGTCGTTGTCGTTGTCGTT | 28 | 0 |
| | (SEQ. ID NO: 96) | | |
| 2015 | TCGTCGTCGTCGTT | 14 | 0 |
| | (SEQ ID NO: 97) | | |
| 2016 | TGTCGTTGTCGTT | 3 | 0 |
| | (SEQ. ID NO: 98) | | |

₁PBMC were collected from normal donors and spun over Ficoll, then cultured at 10⁶ cells/well in 96 well microtiter plates with or without the indicated oligonucleotide which were added to cultures at μg/ml. Supernatants were collected at 24 hr and tested for IL-12 levels by ELISA as described in methods. A standard curve was run in each experiment, which represents a different donor.

TABLE 3

| | CD86 | CD40 | |
|---|---|---|---|
| Compound | (5 Exp) | (4 Exp.) | T cell proliferation |
| GM-CSF | 1.9 | 2.5 | 13.3 |
| CpG | 3.9 | 3.5 | 19.7 |
| CpG + GM-CSF | 7.0 | 8.5 | 25.6 |

TABLE 1
Olionucleotide Stimulation of Mouse B Cells

| | | | Stimulation Index¹ | |
|---|---|---|---|---|
| ODN | Sequence (5′ to 3′)† | | ³H Uridine | IgM Production |
| 1 | (SEQ ID NO: 1) | GCTAGACGTTAGCGT | 6.1 ± 0.8 | 17.9 ± 3.6 |
| 1a | (SEQ. ID NO: 42) | ......T........ | 1.2 ± 0.2 | 1.7 ± 0.5 |
| 1b | (SEQ ID NO: 3) | ......Z........ | 1.2 ± 0.1 | 1.8 ± 0.0 |
| 1c | (SEQ ID NO: 4) | ............Z.. | 10.3 ± 4.4 | 9.5 ± 1.8 |
| 1d | (SEQ ID NO: 5) | ..AT......GAGC. | 13.0 ± 2.3 | 18.3 ± 7.5 |
| 2 | (SEQ ID NO: 6) | ATGGAAGGTCCAGCGTTCTC | 2.9 ± 0.2 | 13.6 ± 2.0 |
| 2a | (SEQ ID NO: 7) | ..C..CTC..G......... | 7.7 ± 0.8 | 24.2 ± 3.2 |
| 2b | (SEQ ID NO: 8) | ..Z..CTC.ZG..Z...... | 1.6 ± 0.5 | 2.8 ± 2.2 |
| 2c | (SEQ ID NO: 9) | ..Z..CTC..G......... | 3.1 ± 0.6 | 7.3 ± 1.4 |
| 2d | (SEQ ID NO: 10) | ..C..CTC..G......Z.. | 7.4 ± 1.4 | 27.7 ± 5.4 |
| 2e | (SEQ ID NO: 740) | ............A....... | 5.6 ± 2.0 | ND |
| 3D | (SEQ ID NO: 12) | GAGAACGCTGGACCTTCCAT | 4.9 ± 0.5 | 19.9 ± 3.6 |
| 3Da | (SEQ ID NO: 749) | ..........C......... | 6.6 ± 1.5 | 33.9 ± 6.8 |
| 3Db | (SEQ ID NO: 14) | .........C.......G.. | 10.1 ± 2.8 | 25.4 ± 0.8 |
| 3Dc | (SEQ ID NO: 15) | ...C.A.............. | 1.0 ± 0.1 | 1.2 ± 0.5 |
| 3Dd | (SEQ ID NO: 17) | .....Z.............. | 1.2 ± 0.2 | 1.0 ± 0.4 |
| 3De | (SEQ ID NO: 12) | .............Z...... | 4.4 ± 1.2 | 18.8 ± 4.4 |
| 3Df | (SEQ ID NO: 18) | .......A............ | 1.6 ± 0.1 | 7.7 ± 0.4 |
| 3Dg | (SEQ ID NO: 19) | .........CC.G.ACTG.. | 6.1 ± 1.5 | 18.6 ± 1.5 |
| 3M | (SEQ ID NO: 22) | TCCATGTCGGTCCTGATGCT | 4.1 ± 0.2 | 23.2 ± 4.9 |
| 3Ma | (SEQ ID NO: 21) | ......CT............ | 0.9 ± 0.1 | 1.8 ± 0.5 |
| 3Mb | (SEQ ID NO: 22) | .......Z............ | 1.3 ± 0.3 | 1.5 ± 0.6 |
| 3Mc | (SEQ ID NO: 23) | ...........Z........ | 5.4 ± 1.5 | 8.5 ± 2.6 |
| 3Md | (SEQ ID NO: 24) | ......A..T.......... | 17.2 ± 9.4 | ND |
| 3Me | (SEQ ID NO: 741) | ...............C..A. | 3.6 ± 0.2 | 14.2 ± 5.2 |
| 4 | (SEQ ID NO: 26) | TCAACGTT | 6.1 ± 1.4 | 19.2 ± 5.2 |
| 4a | (SEQ ID NO: 27) | ....GC.. | 1.1 ± 0.2 | 1.5 ± 1.1 |
| 4b | (SEQ ID NO: 28) | ...GCGC. | 4.5 ± 0.2 | 9.6 ± 3.4 |
| 4c | (SEQ ID NO: 2306) | ...TCGA. | 2.7 ± 1.0 | ND |
| 4d | (SEQ ID NO: 30) | ..TT..AA | 1.3 ± 0.2 | ND |
| 4e | (Residue 2-8 of | -....... | 1.3 ± 0.2 | 1.1 ± 0.5 |
| | SEQ ID NO: 26) | | | |
| | (SEQ ID NO: 31) | | | |
| 4f | (SEQ ID NO: 32) | C....... | 3.9 ± 1.4 | ND |
| 4g | (Residue 11-18 of | --......CT | 1.4 ± 0.3 | ND |
| | SEQ ID NO: 740) | | | |
| | (SEQ ID NO: 2307) | | | |
| 4h | (SEQ ID NO: 34) | .......C | 1.2 ± 0.2 | ND |
| LPS | | | 7.8 ± 2.5 | 4.8 ± 1.0 |

¹Stimulation indexes are the means and std. dev. derived from at least 3 separate experiments, and are compared to wells cultured with no added ODN.
ND = not done.
CpG dinuclectides are underlined.
Dots indicate identity;
dashes indicate deletions.
Z indicates S methyl cytosine.

TABLE 2
Identification of the optimal CpG motif for Murine IL-6 production and
B cell activation

| | | IL-6 | (pg/ml)^{a} | | |
|---|---|---|---|---|---|
| ODN | SEQUENCE (5′-3′) | CH12.LX | SPLENIC B CELL | SI^{b} | IgM (ng/ml)^{c} |
| 512 | (SEQ ID NO: 22) TCCATGTCGTCCTGATGCT | 1300 ± 106 | 627 ± 43 | 5.8 ± 0.3 | 7315 ± 1324 |
| 1637 | (SEQ ID NO: 43) ......C............. | 136 ± 27 | 46 ± 6 | 1.7 ± 0.2 | 770 ± 72 |
| 1615 | (SEQ ID NO: 44) ......G............. | 1201 ± 155 | 850 ± 202 | 3.7 ± 0.3 | 3212 ± 617 |
| 1614 | (SEQ ID NO: 45) ......A............. | 1533 ± 321 | 1812 ± 103 | 10.8 ± 0.6 | 7558 ± 414 |
| 1636 | (SEQ ID NO: 46) .........A.......... | 1181 ± 76 | 947 ± 132 | 5.4 ± 0.4 | 3983 ± 485 |
| 1634 | (SEQ ID NO: 47) .........C.......... | 1049 ± 223 | 1671 ± 175 | 9.2 ± 0.9 | 6256 ± 261 |
| 1619 | (SEQ ID NO: 48) .........T.......... | 1555 ± 304 | 2908 ± 129 | 12.5 ± 1.0 | 8243 ± 698 |
| 1618 | (SEQ ID NO: 24) ......A..T.......... | 2109 ± 291 | 2596 ± 166 | 12.9 ± 0.7 | 10425 ± 674 |
| 1639 | (SEQ ID NO: 49) .....AA...T.......... | 1827 ± 83 | 2012 ± 132 | 11.5 ± 0.4 | 9489 ± 103 |
| 1707 | (SEQ ID NO: 50) ......A..TC......... | ND | 1147 ± 175 | 4.0 ± 0.2 | 3534 ± 217 |
| 1708 | (SEQ ID NO: 51) .....CA..TG......... | ND | 59 ± 3 | 1.5 ± 0.1 | 466 ± 109 |

Dots indicate identity; CpG dinucleotides are underlined; ND = not done
^{a}The experiment was done at least three times with similar results. The level of IL-6 of unstimulated control cultures of both CH12.LX and splenic B cells was ≤10 pg/ml. The IgM level of unstimulated culture was 547 ± 82 ng/ml. CpG dinucleotides are underlined and dots indicate identity.
^{b}[³H] Uridine uptake was indicated as a fold increase (SI: stimulation index) from unstimulated control (2322.67 ± 213.68 cpm). Cells were stimulated with 20 μM of various CpG O-ODN. Data present the mean ± SD of triplicates
^{c}Measured by ELISA.

TABLE 3
Induction of Murine IL-6 secretion by CpG
motifs in bacterial DNA or oligonucleotides.

| Treatment | IL-6 (pg/ml) |
|---|---|
| calf thymus DNA | ≤10 |
| calf thymus DNA + DNase | ≤10 |
| E. coli DNA | 1169.5 ± 94.1 |
| E. coli DNA + DNase | ≤10 |
| CpG methylated E. coli DNA | ≤10 |
| LPS | 280.1 ± 17.1 |
| Media (no DNA) | ≤10 |

| ODN | | | |
|---|---|---|---|
| 5a | SEQ. ID. | ATGGACTCTCCAGCGTTCTC | 1096.4 ± 372.0 |
| | No: 35 | | |
| 5b | SEQ. ID. | .....AGG....A....... | 1124.5 ± 126.2 |
| | No: 740 | | |
| 5c | SEQ. ID. | ..C.......G......... | 1783.0 ± 189.5 |
| | No: 7 | | |
| 5d | SEQ. ID. | .... AGG..C..T...... | ≤10 |
| | No: 742 | | |
| 5e | SEQ. ID. | ..C.......G...Z...... | 851.1 ± 114.4 |
| | No: 2308 | | |
| 5f | SEQ. ID. | ..Z......ZG..Z...... | ≤10 |
| | No: 9 | | |
| 5g | SEQ. ID. | ..C.......G......Z.. | 1862.3 ± 87.26 |
| | No: 10 | | |

T cell depleted spleen cells from DBA/2 mice were stimulated with phosphodiester modified oligonucleotides (O-ODN) (20 μM), calf thymus DNA (50 μg/ml)or E. Coli DNA (50 μg/ml) with ot without enzyme treatment, or LPS (10 μg/ml) for 24 hr.
Data represent the mean (pg/ml) ± SD of triplicates.
CpG dinucleotides are underlined and dots indicate identity.
Z indicates 5-methylcytosine.

TABLE 4
Secretion of Murine IL-6 induced by CpG DNA
stimulation in vivo.

| Stimulant | IL-6 (pg/ml) |
|---|---|
| PBS | <50 |
| E. coli DNA | 13858 ± 3143 |
| Calf Thymus DNA | <50 |
| CpG S-ODN | 20715 ± 606 |
| non-CpG S-ODN | <50 |

Mice (2 mice/group) were i.v. injected with 100 μl of PBS, 200 μg of E. coli DNA or calf. thymus DNA, or 500 μg of CpG S-ODN or non-CpG control S-ODN. Mice were bled 2 hr after injection and 1:10 dilution of each serum was analyzed by IL-6 ELISA. Sensitivity limit of IL-6 ELISA was 5 pg/ml. Sequences of the CpG S-ODN is 5′GCATGACGT-TGAGCT3′ (SEQ. ID. No: 6) and of the non-stimulatory S-ODN is 5′GCTAGATGTTAGCGT3′ (SEQ. ID. No: 49). Note that although there is a CpG in sequence 48, it is too close to the 3′ end to effect stimulation, as explained herein. Data represent mean ± SD of duplicates. The experiment was done at least twice with similar results.

TABLE 5
Induction of human PBMC cytokine secrtetion by CpG oligos

| ODN | Sequence (5′-3′) | IL-6₁ | TNF-_{cx1} | IFN-_{γ1} | GM-CSF | IL-12 |
|---|---|---|---|---|---|---|
| 512 | TCCATGTCGGTCCTGATGCT | 500 | 140 | 15.6 | 70 | 250 |
| SEQ ID NO: 22 | | | | | | |
| 1637 | ......C............. | 550 | 16 | 7.8 | 15.6 | 16 |
| SEQ ID NO: 43 | | | | | | |
| 1615 | ......G............. | 600 | 145 | 7.8 | 45 | 145 |
| SEQ ID NO: 44 | | | | | | |
| 1614 | ......A............. | 550 | 31 | 0 | 50 | 31 |
| SEQ ID NO: 45 | | | | | | |
| 1636 | .........A.......... | 325 | 250 | 35 | 40 | 250 |
| SEQ ID NO: 46 | | | | | | |
| 1634 | .........C.......... | 300 | 400 | 40 | 85 | 400 |
| SEQ ID NO: 47 | | | | | | |
| 1619 | .........T.......... | 275 | 450 | 200 | 80 | 450 |
| SEQ ID NO: 48 | | | | | | |
| 1618 | ......A..T.......... | 300 | 60 | 15.6 | 15.6 | 62 |
| SEQ ID NO: 24 | | | | | | |
| 1639 | .....AA..T.......... | 625 | 220 | 15.6 | 40 | 220 |
| SEQ ID NO: 49 | | | | | | |
| 1707 | ......A..TC......... | 300 | 70 | 17 | 0 | 70 |
| SEQ ID NO: 50 | | | | | | |
| 1708 | .....CA..TG......... | 270 | 10 | 17 | ND | 10 |
| SEQ ID NO: 51 | | | | | | |

dots indicate identity;
CpG dinucleotides are underlined
₁measured by ELISA using Quantikine kits from R&D Systems (pg/ml) Cells were caltured in 10% autologous serum with the indicated oligodeoxynucleotides (12 μg/ml) for 4 hr in the case of TNF-α or 24 hr for the other cytokines before supernatant harvest and assay. Data are presented as the level of cytokine above that in wells with no added oligodeoxynucleotide.

TABLE 6
CpG DNA induces cytokine secretion by human PBMC

| | TNF- | IL-6 | IFN-γ | RANTES |
|---|---|---|---|---|
| DNA | α(pg/ml)¹ | (pg/ml) | (pg/ml) | (pg/ml) |
| EC DNA (50 μg/ml) | 900 | 12,000 | 700 | 1560 |
| EC DNA (5 μg/ml) | 850 | 11,000 | 400 | 750 |
| EC DNA (0.5 μ/ml) | 500 | ND | 200 | 0 |
| EC DNA (0.05 μg/ml) | 62.5 | 10,000 | 15.6 | 0 |
| EC DNA (50 μg/ml) + | 0 | ND | ND | ND |
| L-LME² | | | | |
| EC DNA (10 μg/ml) | 0 | 5 | ND | ND |
| Methyl.³ | | | | |
| CT DNA (50 μg/ml) | 0 | 600 | 0 | 0 |

¹Levels of all cytokines were determined by ELISA using Quantikine kits from R&D Systems as described in the previous table. Results are representative using PBMC from different donors.
²Cells were pretreated for 15 min. with L-leucyl-L-leucine methyl ester (M-LME) to determine whether the cytokine production under these conditions was from monocytes (or other L-LME-sensitive cells).
³EC DNA was methylated using 2 U/μg DNA of CpG methylase (New England Biolabs) according to the manufacturer's directions, and methylation confirmed by digestion with Hpa-II and Msp-I. As a negative control, samples were included containing twice the maximal amount of LPS contained in the highest concentration of EC DNA which failed to induce detectable cytokine production under these experimental conditions.
ND = not done

TABLE 7
CpG DNA induces cytokine expression in purified human macrophages

| | IL-6 (pg/ml) | GM-CSF (pg/ml) | TNF-α (pg/ml) |
|---|---|---|---|
| Cells alone | 0 | 0 | 0 |
| CT DNA (50 μl/ml) | 0 | 0 | 0 |
| EC DNA (50 μl/ml) | 2000 | 15.6 | 1000 |

TABLE 8
Induction Of NK Activity By CpG Oligodeoxynucleotides (ODN)

| | % YAC-1 Specific Lysis* | | % 2C11 Specific Lysis | |
|---|---|---|---|---|
| | Effector:Target | | Effector:Target | |
| ODN | 50:1 | 100:1 | 50:1 | 100:1 |
| None | −1.1 | −1.4 | 15.3 | 16.6 |
| 1 | 16.1 | 24.5 | 38.7 | 47.2 |
| 3Dd | 17.1 | 27.0 | 37.0 | 40.0 |
| non-CpG | −1.6 | −1.7 | 14.8 | 15.4 |
| ODN | | | | |

TABLE 9
Induction of NK Activity by DNA Containing CpG Motifs but not by Non-
CpG DNA

| | | LU/10⁶ | |
|---|---|---|---|
| | DNA or Cytokine Added | Mouse Cells | Human Cells |
| Expt. 1 | None | 0.00 | 0.00 |
| | IL-2 | 16.68 | 15.82 |
| | E. Coli, DNA | 7.23 | 5.05 |
| | Calf thymus DNA | 0.00 | 0.00 |
| Expt. 2 | None | 0.00 | 3.28 |
| | 1585 ggGGTCAACGTTGACgggg (SEQ ID No. 52) | 7.38 | 17.98 |
| | 1629 -------gtc----- (SEQ ID No. 750) | 0.00 | 4.4 |
| Expt. 3 | None | 0.00 | |
| | 1613 GCTAGACGTTAGTGT (SEQ ID No. 54) | 5.22 | |
| | 1769 -------Z----- (SEQ ID No. 745) | 0.02 | ND |
| | 1619 TCCATGTCGTTCCTGATGCT (SEQ ID No: 48) | 3.35 | |
| | 1765 -------Z--------- (SEQ ID No. 56) | 0.11 | |

CpG dinuoleotides in ODN sequences are indicated by underlying;
Z indicates methylcytosine.
Lower case letters indicate nuclease resistant phosphorothioate modified internucleotide linkages which, in titration experiments, were more than 20 times as potent as non-modified ODN, depending on the flanking bases.
Poly G ends (g) were used in some ODN, because they significantly increase the level of ODN uptake.

TABLE 10
ODN induction of NK Lytic Activity (LU)

| ODN | | | |
|---|---|---|---|
| cells | | LU | |
| alone | Sequence (5′-3′) | 0.01 | |
| 1754 | ACCATGGACGATCTGTTTCCCCTC | 0.02 | SEQ ID NO: 58 |
| 1758 | TCTCCCAGCGTGCGCCAT | 0.05 | SEQ ID NO: 59 |
| 1761 | TACCGCGTGCGACCCTCT | 0.05 | SEQ ID NO: 60 |
| 1776 | ACCATGGACGAACTGTTTCCCCTC | 0.03 | SEQ ID NO: 61 |
| 1777 | ACCATGGACGAGCTGTTTCCCCTC | 0.05 | SEQ ID NO: 62 |
| 1778 | ACCATGGACGTACTGTTTCCCCTC | 0.01 | SEQ ID NO: 63 |
| 1779 | ACCATGGACGTACTGTTTCCCCTC | 0.02 | SEQ ID NO: 64 |
| 1780 | ACCATGGACGGTCTGTTTCCCCTC | 0.29 | SEQ ID NO: 65 |
| 1781 | ACCATGGACGTTCTGTTTCCCCTC | 0.38 | SEQ ID NO: 66 |
| 1823 | GCATGACGTTGAGCT | 0.08 | SEQ ID NO: 41 |
| 1824 | CACGTTGAGGGGCAT | 0.01 | SEQ ID NO: 67 |
| 1825 | CTGCTGAGACTGGAG | 0.01 | SEQ ID NO: 68 |
| 1828 | TCAGCGTGCGCC | 0.01 | SEQ ID NO: 69 |
| 1829 | ATGACGTTCCTGACGTT | 0.42 | SEQ ID NO: 70 |
| 1830² | RANDOM SEQUENCE | 0.25 | |
| 1834 | TCTCCCAGCGGGCGCAT | 0.00 | SEQ ID NO: 71 |
| 1836 | TCTCCCAGCGCGCGCCAT | 0.46 | SEQ ID NO: 72 |
| 1840 | TCCATGTCGTTCCTGTCGTT | 2.70 | SEQ ID NO: 73 |
| 1841 | TCCATAGCGTTCCTAGCGTT | 1.45 | SEQ ID NO: 74 |
| 1842 | TCGTCGCTGTCTCCGCTTCTT | 0.06 | SEQ ID NO: 75 |
| 1851 | TCCTGACGTTCCTGACGTT | 2.32 | SEQ ID NO: 76 |

¹Lytic unite (LU) were measured as described (8). Briefly, PBMC were collected from normal donors and spun over Ficoll, then cultured with or without the indicated ODN (which were added to cultures at 6 μg/ml) for 24 hr. Then their ability to lyse ⁵¹Cr-labeled K562 cells was determined. The results shown are typical of those obtained with several different normal human donors.
²This oligo mixture contained a random selection of all 4 bases at each position.

TABLE 11
Induction of NK LU by Phoshorothioate CpG ODN with Good Motifs

| ODN¹ | | | | | |
|---|---|---|---|---|---|
| cells | | | expt. 1 | expt. 2 | expt. 3 |
| alone | sequence (5′-3′) | SEQ ID NO: | 0.00 | 1.26 | 0.46 |
| 1840 | TCCATGTCGTTCCTGTCGTT | 73 | 2.33 | ND | ND |
| 1960 | TCCTGTCGTTCCTGTCGTT | 77 | ND | 0.48 | 8.99 |
| 1961 | TCCATGTCGTTTTTGTCGTT | 78 | 4.03 | 1.23 | 5.08 |
| 1962 | TCCTGTCGTTCCTTGTCGTT | 79 | ND | 1.60 | 5.74 |
| 1963 | TCCTTGTCGTTCCTGTCGTT | 80 | 3.42 | ND | ND |
| 1965 | TCCTGTCGTTTTTTGTCGTT | 81 | 0.46 | 0.42 | 3.48 |
| 1966 | TCGTCGCTGTCTCCGCTTCTT | 75 | 2.62 | ND | ND |
| 1967 | TCGTCGCTGTCTGCCCTTCTT | 82 | 5.82 | 1.64 | 8.32 |
| 1968 | TCGTCGCTGTTGTCGTTTCTT | 83 | 3.77 | 5.26 | 5.12 |
| 1979² | TCCATGTZGTTCCTGTZGTT | 84 | 1.32 | ND | ND |
| 1982 | TCCAGGACTTCTCTCAAGTT | 751 | 0.05 | ND | 0.98 |
| 1990 | TCCATGCGTGCGTGCGTTTT | 86 | 2.10 | ND | ND |
| 1991 | TCCATGCGTTGCGTTGCGTT | 87 | 0.89 | ND | ND |
| 2002 | TCCACGACGTTTTCGACGTT | 88 | 4.02 | 1.31 | 9.79 |
| 2005 | TCGTCGTTGTCGTTGTCGTT | 89 | ND | 4.22 | 12.73 |
| 2006 | TCGTCGTTTTGTCGTTTTGTCGT | 752 | ND | 6.17 | 12.82 |
| 2007 | TCGTCGTTGTCGTTTTGTCGTT | 91 | ND | 2.68 | 9.65 |
| 2008 | GCGTGCGTTGTCGTTGTCGTT | 92 | ND | 1.37 | 8.15 |
| 2010 | GCGGCGGGCGGCGCGCGCCC | 93 | ND | 0.01 | 0.05 |
| 2012 | TGTCGTTTGTCGTTTGTCGTT | 94 | ND | 2.02 | 11.61 |
| 2013 | TGTCGTTGTCGTTGTCGTTGTCGTT | 95 | ND | 0.56 | 5.22 |
| 2014 | TGTCGTTGTCGTTGTCGTT | 96 | ND | 5.74 | 10.89 |
| 2015 | TCGTCGTCGTCGTT | 97 | ND | 4.53 | 10.13 |
| 2016 | TGTCGTTGTCGTT | 98 | ND | 6.54 | 8.06 |

¹PBMC essentially as described herein. Results are representative of 6 separate experiments; each experiment represents a different donor.
²This is the methylated version of ODN 1840 (SEQ ID NO: 83); Z = 5-methyl cytosine at residues 8 and 17; LU is lytic units; ND = not done; CpG dinucleotides are underlined for clarity

TABLE 12
Induction of human B cell proliferation by Phosphorothicate CpG ODN

| | | | Stimulation Index^{1L} | | | | | |
|---|---|---|---|---|---|---|---|---|
| ODN | sequence (5′ 3′) | SEQ ID NO: | expt. 1 | expt. 2 | expt. 3 | expt. 4 | expt. 5 | expt. 6 |
| 1840 | TCCATGTCGTTCCTGTCGTT | 73 | 4 | ND | ND | ND | ND | 34 |
| 1841 | TCCATAGCGTTCCTAGCGTT | 74 | 3 | ND | ND | ND | ND | ND |
| 1960 | TCCTGTCGTTCCTGTCGTT | 77 | ND | 2.0 | 2.0 | 3.6 | ND | ND |
| 1961 | TCCATGTCGTTTTTGTCGTT | 78 | 2 | 3.9 | 1.9 | 3.7 | ND | 37 |
| 1962 | TCCTGTCGTTCCTTGTCGTT | 79 | ND | 3.9 | 1.9 | 3.9 | 5.4 | 35 |
| 1963 | TCCTTGTCGTTCCTGTCGTT | 80 | 3 | ND | ND | ND | ND | ND |
| 1965 | TCCTGTCGTTTTTTGTCGTT | 81 | 4 | 3.7 | 2.4 | 4.7 | 6.0 | 43 |
| 1967 | TCGTCGTGTCTGCCCTTCTT | 82 | ND | 4.4 | 2.0 | 4.5 | 5.0 | 38 |
| 1968 | TCGTCGCTGTGTCGTTTCTT | 83 | ND | 4.0 | 2.0 | 4.9 | 8.7 | 38 |
| 1982 | TCCAGGACTTCTCTCAGGTT | 85 | 3 | 1.8 | 1.3 | 3.1 | 3.2 | 12 |
| 2002 | TCCACGACGTTTTCGACGTT | 88 | ND | 2.7 | 1.4 | 4.4 | ND | 14 |
| 2005 | TCGTCGTTGTCGTTGTCGTT | 89 | 5 | 3.2 | 1.2 | 3.0 | 7.9 | 37 |
| 2006 | TCGTCGTTTTGTCGTTTTGTCGTT | 90 | 4 | 4.5 | 2.2 | 5.8 | 8.3 | 40 |
| 2007 | TCGTCGTTGTCGTTTTGTCGTT | 91 | 3 | 4.0 | 4.2 | 4.1 | ND | 22 |
| 2008 | GCGTGCGTTGTCGTTGTCGTT | 92 | ND | 3.0 | 2.4 | 1.6 | ND | 12 |
| 2010 | GCGGCGGGCGGCGCGCGCCC | 93 | ND | 1.6 | 1.9 | 3.2 | ND | ND |
| 2012 | TGTCGTTTGTCGTTTGTCGTT | 94 | 2 | 2.8 | 0 | 3.2 | ND | 33 |
| 2013 | TGTCGTTGTCGTTGTCGTTGTCGTT | 95 | 3 | 2.3 | 3.1 | 2.8 | ND | 7 |
| 2014 | TGTCGTTGTCGTTGTCGTT | 96 | 3 | 2.5 | 4.0 | 3.2 | 6.7 | 14 |
| 2015 | TCGTCGTCGTCGTT | 97 | 5 | 1.8 | 2.6 | 4.5 | 9.4 | 1 |
| 2016 | TGTCGTTGTCGTT | 98 | ND | 1.1 | 1.7 | 2.7 | 7.3 | 1 |

¹Cells = human spleen cells stored at −70° C. after surgical harvest or PBNC collected from normal donors and spun over Ficoll. Cells were cultured in 96 well U-bottom microtiter lates with or without the indicated ODN (which were added to cultures at 6 μml). N = 12 experiments. Cells were cultured for 4-7 days, pulsed with 1 μCi of ³H thymidine for 18 hr before harvest and scintillation counting. Stimulation index = the ratio of cpm in wells without ODN to that in wells that had been stimulated throughout the culture period with the indicated ODN (there were no further additions of ODN after the culture were set up). ND = not done

TABLE 13
Induction of human IL-12 secretion by
Phophorothicate CpG ODN

| | | SEQ | IL-12 (pg/ml) | |
|---|---|---|---|---|
| | | ID | expt. | expt. |
| ODN¹ | sequence (5′-3′) | no | 1 | 2 |
| cells | | | 0 | 0 |
| alone | | | | |
| 1962 | TCCTGTCGTTCCTTGTCGTT | 79 | 19 | 0 |
| 1965 | TCCTGTCGTTTTTTGTCGTT | 81 | 36 | 0 |
| 1967 | TCGTCGCTGTCTGCCCTTCTT | 82 | 41 | 0 |
| 1968 | TCGTCGCTGTTGTCGTTTCTT | 83 | 24 | 0 |
| 2005 | TCGTCGTTGTCGTTGTCGTT | 89 | 25 | 0 |
| 2006 | TCGTCGTTTTGTCGTTTTGTCGTT | 90 | 29 | 15 |
| 2014 | TGTCGTTGTCGTTGTCGTT | 96 | 28 | 0 |
| 2015 | TCGTCGTCGTCGTT | 97 | 14 | 0 |
| 2016 | TGTCGTTGTCGTT | 98 | 3 | 0 |

¹PBMC were collected from normal donors and spun over Ficoll, then cultured at 10⁶ cells/well in 96 well microtiter plates with or without the indicated ODN which were added to cultures at 6 μg/ml. Supernatants were collected at 24 hr and tested for IL-12 levels by ELISA as described in methods. A standard curve was run in each experiment, which represents a different donor.

TABLE 14
Different CpG motifs stimulate optimal
murine B cell and NK activation

| | | B cell | NK |
|---|---|---|---|
| ODN | Sequence | activation¹ | activation² |
| 1668 | TCCATGACGTTCCTGATGCT | 42,849 | 2.52 |
| | (SEQ. ID. NO: 24) | | |
| 1758 | TCTCCCAGCGTGCGCCAT | 1,747 | 6.66 |
| | (SEQ. ID. NO: 59) | | |
| NONE | | 367 | 0.00 |

CpG dinucleotides are underlined; oligonucleotides were synthesized with phosphorothioate modified backbones to improve their nuclease resistance.
¹Measured by ³H thymidine incorporation after 48 hr culture with oligodeoxynucleotides at a 200 nM concentration as described in Example 1.
²Measured in lytic units.

TABLE 15

| | Specific blockade of CpG-induced TNF-α and IL-12 expression by inhibitors | | | | | | | | | | | |
|---|---|---|---|---|---|---|---|---|---|---|---|---|
| | of endosomal acidification or NFκB activation | | | | | | | | | | | |
| | | | Inhibitors: | | | | | | | | | Bisglio- |
| | | | Bafilomycin | | Chloroquine | | Monensin | | NAC | TPCK | Gliotoxin | toxin |
| | Medium | | (250 nM) | | (2.5 μg/ml) | | (10 μM) | | (50 mM) | (50 μM) | (0.1 μg/ml) | (0.1 μg/ml) |
| activators | TNF-α | IL-12 | TNF-α | IL-12 | TNF-α | IL-12 | TNF-α | IL-12 | TNF-α | TNF-α | TNF-α | TNF-α |
| Medium | 37 | 147 | 46 | 102 | 27 | 20 | 22 | 73 | 10 | 24 | 17 | 41 |
| CpG | 455 | 17,114 | 71 | 116 | 28 | 6 | 49 | 777 | 54 | 23 | 31 | 441 |
| ODN | | | | | | | | | | | | |
| LPS | 901 | 22,485 | 1370 | 4051 | 1025 | 12418 | 491 | 4796 | 417 | 46 | 178 | 1120 |

TABLE 15 legend IL-12 and TNF-α assays: The murine monocyte cell line 3774 (1 × 10⁵ cells/ml for IL 12 or 1 × 10⁶ cells/ml for TNF-α), were cultured with or without the indicated inhibitors at the concentrations shown for 2 hr and then stimulated with the CpG oligodeoxynucleotide (ODN) 1826 (TCCATGACGTTCCTGACGTT SEQ ID NO: 100) at 2 μm or LPS (10 μg/ml) for 4 hr (TNF-α or 24 hr (IL-12) at which time the supernatant was harvested. ELISA for IL-12 or TNF-α (pg/ml) was performed on the supernatants essentially as described (A.K. Krieg, A.-K. Yi, S. Matson, T.J. Waldschmidt, G.A. Bishop, R. Teasdale, G. Koretzy and D. Klinman, Nature 374, 546 (1995); Yi A.-K., D.M. Klinman, T.L. Martin, S. Matson and A.M. Krieg. J Immunol., 157, 5394-5402 (1996); Krieg, A.M, J Lab. Clin. Med., 128, 128-133 (1996). Cells cultured with ODN that lacked CpG motifs did not induce cytokine secretion. Similar specific inhibition of CpG responses was seen with IL-6 assays, and in experiments using primary spleen cells or the B cell lines CH12.LX and WEHI-231.2.5 μg/ml of chloroquine is equivalent to < 5 μM. Other inhibitors of NF-κB activation including PDTC and calpain inhibitors I and II gave similar results to the inhibitors shown. The results shown are representative of those obtained in ten different experiments.

TABLE 3
Plasmids containing immunostimulatory CpG motifs

| | | | Species specificity and |
|---|---|---|---|
| | | No. CpG, | ODN Equivalence of CpG-S |
| Plasmid | Backbone | Motifs | Insert |
| pMCG-16 | pMAS | 16 | mouse-specific CpG motif |
| pMCG-50 | pMAS | 50 | #1826¹ |
| pMCG- | pMAS | 300 | |
| 100 | | | |
| pMCG- | pMAS | 200 | |
| 200 | | | |
| pHCG-30 | pMAS | 30 | human-specific CpG motif- |
| pHCG-50 | pMAS | 50 | no ODN equivalent² |
| pHCG- | pMAS | 100 | |
| 100 | | | |
| pHCG- | pMAS | 200 | |
| 200 | | | |
| pHIS-40 | pMAS | 40 | human-specific CpG motif |
| pHIS-64 | pMAS | 64 | #2006³ |
| pHIS- | pMAS | 128 | |
| 128 | | | |
| pHIS- | pMAS | 192 | |
| 192 | | | |

¹sequence of 1826 is TCCATGACGTTCCTGACGTT (SEQ ID NO. 100)
²sequence used as a source of CpG motifs is GACTTCGTGTCGTTCTTCTGTCGTCTTTAGCGCTTCTCCTGCGTGCGTCCCTTG(SEQ ID NO: 753)
³sequence of 2006 is TCGTCGTTTTGTCGTTTTGTCGTT(SEQ ID NO: 90)

TABLE 4
Plasmids encoding hepatitis B surface antigen
(derived from ayw or adw subtypes of HBV)

| Plasmid | Backbone | Insert |
|---|---|---|
| pUK-S | pUK21-A2 | HBV-S (ayw) |
| pUKAX-S | pUK21-AX* | HBV-S (ayw) |
| pMAS-S | pMAS | HBV-S (ayw) |
| pMCG16-S | pMCG-16 | HBV-S (ayw) |
| pMCG50-S | pMCG-50 | HBV-S (ayw) |
| pMCG100-S | pMCG-100 | HBV-S (ayw) |
| pMCG200-S | pMCG-200 | HBV-S (ayw) |
| pHCG30-S | pHCG-30 | HBV-S (ayw) |
| pHCG50-S | pHCG-50 | HBV-S (ayw) |
| pHCG100-S | pHCG-100 | HBV-S (ayw) |
| pHCG200-S | pHCG-200 | HBV-S (ayw) |
| pHIS40-S(ad) | pHIS-40 | HBV-S(adw2) |
| pHIS64-S(ad) | pHIS-64 | HBV-S(adw2) |
| pHIS128-S(ad) | pHIS-128 | HBV-S(adw2) |
| pHIS192-S(ad) | pHIS-192 | HBV-S(adw2) |

*pUK21-AX was created by deleting f1 origin from pUK21-A

TABLE 6
ODN used with plasmid DNA

| | ODN | |
|---|---|---|
| Backbone | code number | Sequence |
| S-ODN | 1826 | (SEQ ID NO: 100) |
| | | TCCATGACGTTCCTGACGTT |
| | 1628 | (SEQ ID NO: 754) |
| | | GGGGTCAACGTTGAGGGGGG |
| | 1911 | (SEQ ID NO: 755) |
| | | TCCAGGACTTTCCTCAGGTT |
| | 1982 | (SEQ ID NO: 85) |
| | | TCCAGGACTTCTCTCAGGTT |
| | 2017 | (SEQ ID NO: 756) |
| | | CCCCCCCCCCCCCCCCCCCC |
| O-ODN | 2061 | (SEQ ID NO: 100) |
| | | TCCATGACGTTCCTGACGTT |
| | 2001 | (SEQ ID NO: 757) |
| | | GGCGGCGGCGGCGGCGGCGG |
| SOS-ODN | 1980 | (SEQ ID NO: 100) |
| | | TCCATGACGTTCCTGACGTT |
| | 1585 | (SEQ ID NO: 758) |
| | | GGGTCAACGTTGAGGGGGG |
| | 1844 | (SEQ ID NO: 759) |
| | | TCTCCCAGCGTGCGCCATAT |
| | 1972 | (SEQ ID NO: 760) |
| | | GGGGTCTGTGCTTTTGGGGGG |
| | 2042 | (SEQ ID NO: 761) |
| | | TCAGGGGTGGGGGGAACCTT |
| | 1981 | (SEQ ID NO: 762) |
| | | GGGGTTGACGTTTTGGGGGG |
| | 2018 | (SEQ ID NO: 763) |
| | | TCTAGCGTTTTTAGCGTTCC |
| | 2021 | (SEQ ID NO: 89) |
| | | TCGTCGTTGTCGTTGTCGTT |
| | 2022 | (SEQ ID NO: 90) |
| | | TCGTCGTTTTGTCGTTTTGTGTT |
| | 2023 | (SEQ ID NO: 91) |
| | | TCGTCGTTGTCGTTTTGTCGTT |

TABLE 10
Inhibitory CpG motifs can block B cell
proliferation induced by a stimulatory
CpG motif

| Oligonucleotide added | | |
|---|---|---|
| medium | | 194 |
| 1668 | (TCCATGACGTTCCTGATGCT | 34,669 |
| | (SEQ ID NO: 24) | |
| 1668 | +1735 (GCGTTTTTTTTTGCG) | 24,452 |
| | (SEQ ID NO: 764) | |
| 1720 | (TCCATGAGCTTCCTGATGCT) | 601 |
| | (SEQ ID NO: 765) | |
| 1720 | +1735 | 1109 |

Inhibitory effects of “bad” CpG
motifs on the “good” CpG Oligo 1619

| | | I: −12 in |
|---|---|---|
| Oligonucleotide added | | pg/ml |
| medium | | 0 |
| 1619 | alone | 6 |
| 1619 | +1949 (TCCATGTCGTTCCTGATGCG | 16 |
| | (SEQ ID NO: 766)) | |
| 1619 | +1952 (TCCATGTCGTTCCGCGCGCG | 0 |
| | (SEQ ID NO: 767)) | |
| 1619 | +1953 (TCCATGTCGTTCCTGCCGCT | 0 |
| | (SEQ ID NO: 768)) | |
| 1619 | +1955 (GCGGCGGGCGGCGCGCGCCC | 0 |
| | (SEQ ID NO: 93)) | |

Notes:
The sequence of oligo 1619 is TCCATGTCGTTCCTGATGCT (SEQ ID NO: 48) 1949 has only 1 GCG at the 3′ end, which has essentially no inhibitory activity

TABLE 13
Identification of neutralizing CpG motifs
which reduce the induction of cytokine
secretion by a CpG-S motif in the same
ODN (cis-neutralization)

| | | ODN-induced cytokine | | |
|---|---|---|---|---|
| | | expression² | | |
| ODN | sequence 5′-3′ | IL-6² | IL-12 | IFN-γ |
| None | | <5 | 206 | 898 |
| 1619 | TCCATGTCGTTCCTGATGCT | 1405 | 3130 | 4628 |
| | (SEQ ID NO: 48) | | | |
| 1952 | .............GCGCGCG | 559 | 1615 | 2135 |
| | (SEQ ID NO: 767) | | | |
| 1953 | ...............CC... | | | |
| | (SEQ ID NO: 768) | | | |

¹Dots in the sequence of ODN 1952 and 1953 indicate identity to ODN 1619; CpG dinucleotides are underlined for clarity. ODN without CpG-N or CpG-S motifs had little or no effect on cytokine production. The data shown are representative of 4 experiments.
²All cytokines are given in pg/ml; measured by ELISA on supernatants from DBA/2 spleen cells cultured in 96 well plates at 2 × 10⁷ cells/ml for 24 hr with the indicated ODN at 30 μg/ml. Std. dev. of the triplicate wells was <7%. None of the ODN induced significant amounts of IL-5.

TABLE 14
Inhibition of CpG-induced cytokine
secretion by ODN containing CpG-N motifs

| | | | CpG-S- |
|---|---|---|---|
| | | | induced |
| | | IL-12 | IL-12 |
| ODN | sequence 5′-3′ | secretion¹ | secretion² |
| none | | 268 | 5453 |
| 1895 | GCGCGCGCGCGCGCGCGCGC | 123 | 2719 |
| | (SEQ ID NO: 769) | | |
| 1896 | CCGGCCGGCCGGCCGGCCGG | 292 | 2740 |
| | (SEQ ID NO: 770) | | |
| 1955 | GCGGCGGGCGGCGCGCGCCC | 270 | 2539 |
| | (SEQ ID NO: 93) | | |
| 2037 | TCCATGCCGTTCCTGCCGTT | 423 | 2847 |
| | (SEQ ID NO: 771) | | |

¹BALB/c spleen cells were cultured in 96 well plates at 2 × 10⁷ cells/ml with the indicated ODN for 24 hr and then the supernatants were assayed for IL-12 by ELISA (pg/ml).
²Cells were set up the same as in ¹ except that IL-12 secretion was induced by the addition of the CpG ODN 1619 (TCCATGTCGTTCCTGATGCT) (SEQ ID NO: 48) at 30 μg/ml. The data shown are representative of 5 experiments.

### APPENDIX (C)

Exemplary Human miRNA Sequences
>hsa-let-7a-1 MI0000060
(SEQ ID NO: 772)
UGGGAUGAGGUAGUAGGUUGUAUAGUUUUAGGGUCACACCCACCACUGGGAGAUAACUAUACAAUCUACUGUCUUUC
CUA
>hsa-let-7a-2 MI0000061
(SEQ ID NO: 773)
AGGUUGAGGUAGUAGGUUGUAUAGUUUAGAAUUACAUCAAGGGAGAUAACUGUACAGCCUCCUAGCUUUCCU
>hsa-let-7a-3 MI0000062
(SEQ ID NO: 774)
GGGUGAGGUAGUAGGUUGUAUAGUUUGGGGCUCUGCCCUGCUAUGGGAUAACUAUACAAUCUACUGUCUUUCCU
>hsa-let-7b MI0000063
(SEQ ID NO: 775)
CGGGGUGAGGUAGUAGGUUGUGUGGUUUCAGGGCAGUGAUGUUGCCCCUCGGAAGAUAACUAUACAACCUACUGCCU
UCCCUG
>hsa-let-7c MI0000064
(SEQ ID NO: 776)
GCAUCCGGGUUGAGGUAGUAGGUUGUAUGGUUUAGAGUUACACCCUGGGAGUUAACUGUACAACCUUCUAGCUUUCC
UUGGAGC
>hsa-let-7d MI0000065
(SEQ ID NO: 777)
CCUAGGAAGAGGUAGUAGGUUGCAUAGUUUUAGGGCAGGGAUUUUGCCCACAAGGAGGUAACUAUACGACCUGCUGC
CUUUCUUAGG
>hsa-let-7e MI0000066
(SEQ ID NO: 778)
CCCGGGCUGAGGUAGGAGGUUGUAUAGUUGAGGAGGACACCCAAGGAGAUCACUAUACGGCCUCCUAGCUUUCCCCA
GG
>hsa-let-7f-1 MI0000067
(SEQ ID NO: 779)
UCAGAGUGAGGUAGUAGAUUGUAUAGUUGUGGGGUAGUGAUUUUACCCUGUUCAGGAGAUAACUAUACAAUCUAUUG
CCUUCCCUGA
>hsa-let-7f-2 MI0000068
(SEQ ID NO: 780)
UGUGGGAUGAGGUAGUAGAUUGUAUAGUUUUAGGGUCAUACCCCAUCUUGGAGAUAACUAUACAGUCUACUGUCUUU
CCCACG
>hsa-let-7g MI0000433
(SEQ ID NO: 781)
AGGCUGAGGUAGUAGUUUGUACAGUUUGAGGGUCUAUGAUACCACCCGGUACAGGAGAUAACUGUACAGGCCACUGC
CUUGCCA
>hsa-let-7i MI0000434
(SEQ ID NO: 782)
CUGGCUGAGGUAGUAGUUUGUGCUGUUGGUCGGGUUGUGACAUUGCCCGCUGUGGAGAUAACUGCGCAAGCUACUGC
CUUGCUA
>hsa-mir-1-1 MI0000651
(SEQ ID NO: 783)
UGGGAAACAUACUUCUUUAUAUGCCCAUAUGGACCUGCUAAGCUAUGGAAUGUAAAGAAGUAUGUAUCUCA
>hsa-mir-1-2 MI0000437
(SEQ ID NO: 784)
ACCUACUCAGAGUACAUACUUCUUUAUGUACCCAUAUGAACAUACAAUGCUAUGGAAUGUAAAGAAGUAUGUAUUUU
UGGUAGGC
>hsa-mir-7-1 MI0000263
(SEQ ID NO: 785)
UUGGAUGUUGGCCUAGUUCUGUGUGGAAGACUAGUGAUUUUGUUGUUUUUAGAUAACUAAAUCGACAACAAAUCACA
GUCUGCCAUAUGGCACAGGCCAUGCCUCUACAG
>hsa-mir-7-2 MI0000264
(SEQ ID NO: 786)
CUGGAUACAGAGUGGACCGGCUGGCCCCAUCUGGAAGACUAGUGAUUUUGUUGUUGUCUUACUGCGCUCAACAACAA
AUCCCAGUCUACCUAAUGGUGCCAGCCAUCGCA
>hsa-mir-7-3 MI0000265
(SEQ ID NO: 787)
AGAUUAGAGUGGCUGUGGUCUAGUGCUGUGUGGAAGACUAGUGAUUUUGUUGUUCUGAUGUACUACGACAACAAGUC
ACAGCCGGCCUCAUAGCGCAGACUCCCUUCGAC
>hsa-mir-9-1 MI0000466
(SEQ ID NO: 788)
CGGGGUUGGUUGUUAUCUUUGGUUAUCUAGCUGUAUGAGUGGUGUGGAGUCUUCAUAAAGCUAGAUAACCGAAAGUA
AAAAUAACCCCA
>hsa-mir-9-2 MI0000467
(SEQ ID NO: 789)
GGAAGCGAGUUGUUAUCUUUGGUUAUCUAGCUGUAUGAGUGUAUUGGUCUUCAUAAAGCUAGAUAACCGAAAGUAAA
AACUCCUUCA
>hsa-mir-9-3 MI0000468
(SEQ ID NO: 790)
GGAGGCCCGUUUCUCUCUUUGGUUAUCUAGCUGUAUGAGUGCCACAGAGCCGUCAUAAAGCUAGAUAACCGAAAGUA
GAAAUGAUUCUCA
>hsa-mir-10a MI0000266
(SEQ ID NO: 791)
GAUCUGUCUGUCUUCUGUAUAUACCCUGUAGAUCCGAAUUUGUGUAAGGAAUUUUGUGGUCACAAAUUCGUAUCUAG
GGGAAUAUGUAGUUGACAUAAACACUCCGCUCU
>hsa-mir-10b MI0000267
(SEQ ID NO: 792)
CCAGAGGUUGUAACGUUGUCUAUAUAUACCCUGUAGAACCGAAUUUGUGUGGUAUCCGUAUAGUCACAGAUUCGAUU
CUAGGGGAAUAUAUGGUCGAUGCAAAAACUUCA
>hsa-mir-15a MI0000069
(SEQ ID NO: 793)
CCUUGGAGUAAAGUAGCAGCACAUAAUGGUUUGUGGAUUUUGAAAAGGUGCAGGCCAUAUUGUGCUGCCUCAAAAAU
ACAAGG
>hsa-mir-15b MI0000438
(SEQ ID NO: 794)
UUGAGGCCUUAAAGUACUGUAGCAGCACAUCAUGGUUUACAUGCUACAGUCAAGAUGCGAAUCAUUAUUUGCUGCUC
UAGAAAUUUAAGGAAAUUCAU
>hsa-mir-16-1 MI0000070
(SEQ ID NO: 795)
GUCAGCAGUGCCUUAGCAGCACGUAAAUAUUGGCGUUAAGAUUCUAAAAUUAUCUCCAGUAUUAACUGUGCUGCUGA
AGUAAGGUUGAC
>hsa-mir-16-2 MI0000115
(SEQ ID NO: 796)
GUUCCACUCUAGCAGCACGUAAAUAUUGGCGUAGUGAAAUAUAUAUUAAACACCAAUAUUACUGUGCUGCUUUAGUG
UGAC
>hsa-mir-17 MI0000071
(SEQ ID NO: 797)
GUCAGAAUAAUGUCAAAGUGCUUACAGUGCAGGUAGUGAUAUGUGCAUCUACUGCAGUGAAGGCACUUGUAGCAUUA
UGGUGAC
>hsa-mir-18a MI0000072
(SEQ ID NO: 798)
UGUUCUAAGGUGCAUCUAGUGCAGAUAGUGAAGUAGAUUAGCAUCUACUGCCCUAAGUGCUCCUUCUGGCA
>hsa-mir-18b MI0001518
(SEQ ID NO: 799)
UGUGUUAAGGUGCAUCUAGUGCAGUUAGUGAAGCAGCUUAGAAUCUACUGCCCUAAAUGCCCCUUCUGGCA
>hsa-mir-19a MI0000073
(SEQ ID NO: 800)
GCAGUCCUCUGUUAGUUUUGCAUAGUUGCACUACAAGAAGAAUGUAGUUGUGCAAAUCUAUGCAAAACUGAUGGUGG
CCUGC
>hsa-mir-19b-1 MI0000074
(SEQ ID NO: 801)
CACUGUUCUAUGGUUAGUUUUGCAGGUUUGCAUCCAGCUGUGUGAUAUUCUGCUGUGCAAAUCCAUGCAAAACUGAC
UGUGGUAGUG
>hsa-mir-19b-2 MI0000075
(SEQ ID NO: 802)
ACAUUGCUACUUACAAUUAGUUUUGCAGGUUUGCAUUUCAGCGUAUAUAUGUAUAUGUGGCUGUGCAAAUCCAUGCA
AAACUGAUUGUGAUAAUGU
>hsa-mir-20a MI0000076
(SEQ ID NO: 803)
GUAGCACUAAAGUGCUUAUAGUGCAGGUAGUGUUUAGUUAUCUACUGCAUUAUGAGCACUUAAAGUACUGC
>hsa-mir-20b MI0001519
(SEQ ID NO: 804)
AGUACCAAAGUGCUCAUAGUGCAGGUAGUUUUGGCAUGACUCUACUGUAGUAUGGGCACUUCCAGUACU
>hsa-mir-21 MI0000077
(SEQ ID NO: 805)
UGUCGGGUAGCUUAUCAGACUGAUGUUGACUGUUGAAUCUCAUGGCAACACCAGUCGAUGGGCUGUCUGACA
>hsa-mir-22 MI0000078
(SEQ ID NO: 806)
GGCUGAGCCGCAGUAGUUCUUCAGUGGCAAGCUUUAUGUCCUGACCCAGCUAAAGCUGCCAGUUGAAGAACUGUUGC
CCUCUGCC
>hsa-mir-23a MI0000079
(SEQ ID NO: 807)
GGCCGGCUGGGGUUCCUGGGGAUGGGAUUUGCUUCCUGUCACAAAUCACAUUGCCAGGGAUUUCCAACCGACC
>hsa-mir-23b MI0000439
(SEQ ID NO: 808)
CUCAGGUGCUCUGGCUGCUUGGGUUCCUGGCAUGCUGAUUUGUGACUUAAGAUUAAAAUCACAUUGCCAGGGAUUAC
CACGCAACCACGACCUUGGC
>hsa-mir-23c MI0016010
(SEQ ID NO: 809)
AGUGACUUUCCAGGUGUCACACAGUGAGUGGCAUAAUCAGAGUACAAUUUGAGUCAUGCCCAUACAUCACAUUGCCA
GUGAUUACCCAAGGAAAGUGACG
>hsa-mir-24-1 MI0000080
(SEQ ID NO: 811)
CUCCGGUGCCUACUGAGCUGAUAUCAGUUCUCAUUUUACACACUGGCUCAGUUCAGCAGGAACAGGAG
>hsa-mir-24-2 MI0000081
(SEQ ID NO: 812)
CUCUGCCUCCCGUGCCUACUGAGCUGAAACACAGUUGGUUUGUGUACACUGGCUCAGUUCAGCAGGAACAGGG
>hsa-mir-25 MI0000082
(SEQ ID NO: 813)
GGCCAGUGUUGAGAGGCGGAGACUUGGGCAAUUGCUGGACGCUGCCCUGGGCAUUGCACUUGUCUCGGUCUGACAGU
GCCGGCC
>hsa-mir-26a-1 MI0000083
(SEQ ID NO: 814)
GUGGCCUCGUUCAAGUAAUCCAGGAUAGGCUGUGCAGGUCCCAAUGGGCCUAUUCUUGGUUACUUGCACGGGGACGC
>hsa-mir-26a-2 MI0000750
(SEQ ID NO: 815)
GGCUGUGGCUGGAUUCAAGUAAUCCAGGAUAGGCUGUUUCCAUCUGUGAGGCCUAUUCUUGAUUACUUGUUUCUGGA
GGCAGCU
>hsa-mir-26b MI0000084
(SEQ ID NO: 816)
CCGGGACCCAGUUCAAGUAAUUCAGGAUAGGUUGUGUGCUGUCCAGCCUGUUCUCCAUUACUUGGCUCGGGGACCGG
>hsa-mir-27a MI0000085
(SEQ ID NO: 817)
CUGAGGAGCAGGGCUUAGCUGCUUGUGAGCAGGGUCCACACCAAGUCGUGUUCACAGUGGCUAAGUUCCGCCCCCCAG
>hsa-mir-27b MI0000440
(SEQ ID NO: 817)
ACCUCUCUAACAAGGUGCAGAGCUUAGCUGAUUGGUGAACAGUGAUUGGUUUCCGCUUUGUUCACAGUGGCUAAGUU
CUGCACCUGAAGAGAAGGUG
>hsa-mir-28 MI0000086
(SEQ ID NO: 818)
GGUCCUUGCCCUCAAGGAGCUCACAGUCUAUUGAGUUACCUUUCUGACUUUCCCACUAGAUUGUGAGCUCCUGGAGG
GCAGGCACU
>hsa-mir-29a MI0000087
(SEQ ID NO: 819)
AUGACUGAUUUCUUUUGGUGUUCAGAGUCAAUAUAAUUUUCUAGCACCAUCUGAAAUCGGUUAU
>hsa-mir-29b-1 MI0000105
(SEQ ID NO: 820)
CUUCAGGAAGCUGGUUUCAUAUGGUGGUUUAGAUUUAAAUAGUGAUUGUCUAGCACCAUUUGAAAUCAGUGUUCUUG
GGGG
>hsa-mir-29b-2 MI0000107
(SEQ ID NO: 821)
CUUCUGGAAGCUGGUUUCACAUGGUGGCUUAGAUUUUUCCAUCUUUGUAUCUAGCACCAUUUGAAAUCAGUGUUUUA
GGAG
>hsa-mir-29c MI0000735
(SEQ ID NO: 822)
AUCUCUUACACAGGCUGACCGAUUUCUCCUGGUGUUCAGAGUCUGUUUUUGUCUAGCACCAUUUGAAAUCGGUUAUG
AUGUAGGGGGA
>hsa-mir-30a MI0000088
(SEQ ID NO: 823)
GCGACUGUAAACAUCCUCGACUGGAAGCUGUGAAGCCACAGAUGGGCUUUCAGUCGGAUGUUUGCAGCUGC
>hsa-mir-30b MI0000441
(SEQ ID NO: 824)
ACCAAGUUUCAGUUCAUGUAAACAUCCUACACUCAGCUGUAAUACAUGGAUUGGCUGGGAGGUGGAUGUUUACUUCA
GCUGACUUGGA
>hsa-mir-30c-1 MI0000736
(SEQ ID NO: 825)
ACCAUGCUGUAGUGUGUGUAAACAUCCUACACUCUCAGCUGUGAGCUCAAGGUGGCUGGGAGAGGGUUGUUUACUCC
UUCUGCCAUGGA
>hsa-mir-30c-2 MI0000254
(SEQ ID NO: 826)
AGAUACUGUAAACAUCCUACACUCUCAGCUGUGGAAAGUAAGAAAGCUGGGAGAAGGCUGUUUACUCUUUCU
>hsa-mir-30d MI0000255
(SEQ ID NO: 827)
GUUGUUGUAAACAUCCCCGACUGGAAGCUGUAAGACACAGCUAAGCUUUCAGUCAGAUGUUUGCUGCUAC
>hsa-mir-30e MI0000749
(SEQ ID NO: 828)
GGGCAGUCUUUGCUACUGUAAACAUCCUUGACUGGAAGCUGUAAGGUGUUCAGAGGAGCUUUCAGUCGGAUGUUUAC
AGCGGCAGGCUGCCA
>hsa-mir-31 MI0000089
(SEQ ID NO: 829)
GGAGAGGAGGCAAGAUGCUGGCAUAGCUGUUGAACUGGGAACCUGCUAUGCCAACAUAUUGCCAUCUUUCC
>hsa-mir-32 MI0000090
(SEQ ID NO: 830)
GGAGAUAUUGCACAUUACUAAGUUGCAUGUUGUCACGGCCUCAAUGCAAUUUAGUGUGUGUGAUAUUUUC
>hsa-mir-33a MI0000091
(SEQ ID NO: 831)
CUGUGGUGCAUUGUAGUUGCAUUGCAUGUUCUGGUGGUACCCAUGCAAUGUUUCCACAGUGCAUCACAG
>hsa-mir-33b MI0003646
(SEQ ID NO: 832)
GCGGGCGGCCCCGCGGUGCAUUGCUGUUGCAUUGCACGUGUGUGAGGCGGGUGCAGUGCCUCGGCAGUGCAGCCCGG
AGCCGGCCCCUGGCACCAC
>hsa-mir-34a MI0000268
(SEQ ID NO: 833)
GGCCAGCUGUGAGUGUUUCUUUGGCAGUGUCUUAGCUGGUUGUUGUGAGCAAUAGUAAGGAAGCAAUCAGCAAGUAU
ACUGCCCUAGAAGUGCUGCACGUUGUGGGGCCC
>hsa-mir-34b MI0000742
(SEQ ID NO: 834)
GUGCUCGGUUUGUAGGCAGUGUCAUUAGCUGAUUGUACUGUGGUGGUUACAAUCACUAACUCCACUGCCAUCAAAAC
AAGGCAC
>hsa-mir-34c MI0000743
(SEQ ID NO: 835)
AGUCUAGUUACUAGGCAGUGUAGUUAGCUGAUUGCUAAUAGUACCAAUCACUAACCACACGGCCAGGUAAAAAGAUU
>hsa-mir-92a-1 MI0000093
(SEQ ID NO: 836)
CUUUCUACACAGGUUGGGAUCGGUUGCAAUGCUGUGUUUCUGUAUGGUAUUGCACUUGUCCCGGCCUGUUGAGUUUGG
>hsa-mir-92a-2 MI0000094
(SEQ ID NO: 837)
UCAUCCCUGGGUGGGGAUUUGUUGCAUUACUUGUGUUCUAUAUAAAGUAUUGCACUUGUCCCGGCCUGUGGAAGA
>hsa-mir-92b MI0003560
(SEQ ID NO: 838)
CGGGCCCCGGGCGGGCGGGAGGGACGGGACGCGGUGCAGUGUUGUUUUUUCCCCCGCCAAUAUUGCACUCGUCCCGG
CCUCCGGCCCCCCCGGCCC
>hsa-mir-93 MI0000095
(SEQ ID NO: 839)
CUGGGGGCUCCAAAGUGCUGUUCGUGCAGGUAGUGUGAUUACCCAACCUACUGCUGAGCUAGCACUUCCCGAGCCCC
CGG
>hsa-mir-95 MI0000097
(SEQ ID NO: 840)
AACACAGUGGGCACUCAAUAAAUGUCUGUUGAAUUGAAAUGCGUUACAUUCAACGGGUAUUUAUUGAGCACCCACUC
UGUG
>hsa-mir-96 MI0000098
(SEQ ID NO: 841)
UGGCCGAUUUUGGCACUAGCACAUUUUUGCUUGUGUCUCUCCGCUCUGAGCAAUCAUGUGCAGUGCCAAUAUGGGAAA
>hsa-mir-98 MI0000100
(SEQ ID NO: 842)
AGGAUUCUGCUCAUGCCAGGGUGAGGUAGUAAGUUGUAUUGUUGUGGGGUAGGGAUAUUAGGCCCCAAUUAGAAGAU
AACUAUACAACUUACUACUUUCCCUGGUGUGUGGCAUAUUCA
>hsa-mir-99a MI0000101
(SEQ ID NO: 843)
CCCAUUGGCAUAAACCCGUAGAUCCGAUCUUGUGGUGAAGUGGACCGCACAAGCUCGCUUCUAUGGGUCUGUGUCAG
UGUG
>hsa-mir-99b MI0000746
(SEQ ID NO: 844)
GGCACCCACCCGUAGAACCGACCUUGCGGGGCCUUCGCCGCACACAAGCUCGUGUCUGUGGGUCCGUGUC
>hsa-mir-100 MI0000102
(SEQ ID NO: 845)
CCUGUUGCCACAAACCCGUAGAUCCGAACUUGUGGUAUUAGUCCGCACAAGCUUGUAUCUAUAGGUAUGUGUCUGUU
AGG
>hsa-mir-101-1 MI0000103
(SEQ ID NO: 846)
UGCCCUGGCUCAGUUAUCACAGUGCUGAUGCUGUCUAUUCUAAAGGUACAGUACUGUGAUAACUGAAGGAUGGCA
>hsa-mir-101-2 MI0000739
(SEQ ID NO: 847)
ACUGUCCUUUUUCGGUUAUCAUGGUACCGAUGCUGUAUAUCUGAAAGGUACAGUACUGUGAUAACUGAAGAAUGGUG
GU
>hsa-mir-103a-1 MI0000109
(SEQ ID NO: 848)
UACUGCCCUCGGCUUCUUUACAGUGCUGCCUUGUUGCAUAUGGAUCAAGCAGCAUUGUACAGGGCUAUGAAGGCAUUG
>hsa-mir-103a-2 MI0000108
(SEQ ID NO: 849)
UUGUGCUUUCAGCUUCUUUACAGUGCUGCCUUGUAGCAUUCAGGUCAAGCAGCAUUGUACAGGGCUAUGAAAGAACCA
>hsa-mir-103b-1 MI0007261
(SEQ ID NO: 850)
UCAUAGCCCUGUACAAUGCUGCUUGAUCCAUAUGCAACAAGGCAGCACUGUAAAGAAGCCGA
>hsa-mir-103b-2 MI0007262
(SEQ ID NO: 851)
UCAUAGCCCUGUACAAUGCUGCUUGACCUGAAUGCUACAAGGCAGCACUGUAAAGAAGCUGA
>hsa-mir-105-1 MI0000111
(SEQ ID NO: 852)
UGUGCAUCGUGGUCAAAUGCUCAGACUCCUGUGGUGGCUGCUCAUGCACCACGGAUGUUUGAGCAUGUGCUACGGUG
UCUA
>hsa-mir-105-2 MI0000112
(SEQ ID NO: 853)
UGUGCAUCGUGGUCAAAUGCUCAGACUCCUGUGGUGGCUGCUUAUGCACCACGGAUGUUUGAGCAUGUGCUAUGGUG
UCUA
>hsa-mir-106a MI0000113
(SEQ ID NO: 854)
CCUUGGCCAUGUAAAAGUGCUUACAGUGCAGGUAGCUUUUUGAGAUCUACUGCAAUGUAAGCACUUCUUACAUUACC
AUGG
>hsa-mir-106b MI0000734
(SEQ ID NO: 855)
CCUGCCGGGGCUAAAGUGCUGACAGUGCAGAUAGUGGUCCUCUCCGUGCUACCGCACUGUGGGUACUUGCUGCUCCA
GCAGG
>hsa-mir-107 MI0000114
(SEQ ID NO: 856)
CUCUCUGCUUUCAGCUUCUUUACAGUGUUGCCUUGUGGCAUGGAGUUCAAGCAGCAUUGUACAGGGCUAUCAAAGCA
CAGA
>hsa-mir-122 MI0000442
(SEQ ID NO: 857)
CCUUAGCAGAGCUGUGGAGUGUGACAAUGGUGUUUGUGUCUAAACUAUCAAACGCCAUUAUCACACUAAAUAGCUAC
UGCUAGGC
>hsa-mir-124-1 MI0000443
(SEQ ID NO: 858)
AGGCCUCUCUCUCCGUGUUCACAGCGGACCUUGAUUUAAAUGUCCAUACAAUUAAGGCACGCGGUGAAUGCCAAGAA
UGGGGCUG
>hsa-mir-124-2 MI0000444
(SEQ ID NO: 859)
AUCAAGAUUAGAGGCUCUGCUCUCCGUGUUCACAGCGGACCUUGAUUUAAUGUCAUACAAUUAAGGCACGCGGUGAA
UGCCAAGAGCGGAGCCUACGGCUGCACUUGAA
>hsa-mir-124-3 MI0000445
(SEQ ID NO: 860)
UGAGGGCCCCUCUGCGUGUUCACAGCGGACCUUGAUUUAAUGUCUAUACAAUUAAGGCACGCGGUGAAUGCCAAGAG
AGGCGCCUCC
>hsa-mir-125a MI0000469
(SEQ ID NO: 861)
UGCCAGUCUCUAGGUCCCUGAGACCCUUUAACCUGUGAGGACAUCCAGGGUCACAGGUGAGGUUCUUGGGAGCCUGG
CGUCUGGCC
>hsa-mir-125b-1 MI0000446
(SEQ ID NO: 862)
UGCGCUCCUCUCAGUCCCUGAGACCCUAACUUGUGAUGUUUACCGUUUAAAUCCACGGGUUAGGCUCUUGGGAGCUG
CGAGUCGUGCU
>hsa-mir-125b-2 MI0000470
(SEQ ID NO: 863)
ACCAGACUUUUCCUAGUCCCUGAGACCCUAACUUGUGAGGUAUUUUAGUAACAUCACAAGUCAGGCUCUUGGGACCU
AGGCGGAGGGGA
>hsa-mir-126 MI0000471
(SEQ ID NO: 864)
CGCUGGCGACGGGACAUUAUUACUUUUGGUACGCGCUGUGACACUUCAAACUCGUACCGUGAGUAAUAAUGCGCCGU
CCACGGCA
>hsa-mir-127 MI0000472
(SEQ ID NO: 865)
UGUGAUCACUGUCUCCAGCCUGCUGAAGCUCAGAGGGCUCUGAUUCAGAAAGAUCAUCGGAUCCGUCUGAGCUUGGC
UGGUCGGAAGUCUCAUCAUC
>hsa-mir-128-1 MI0000447
(SEQ ID NO: 866)
UGAGCUGUUGGAUUCGGGGCCGUAGCACUGUCUGAGAGGUUUACAUUUCUCACAGUGAACCGGUCUCUUUUUCAGCU
GCUUC
>hsa-mir-128-2 MI0000727
(SEQ ID NO: 867)
UGUGCAGUGGGAAGGGGGGCCGAUACACUGUACGAGAGUGAGUAGCAGGUCUCACAGUGAACCGGUCUCUUUCCCUA
CUGUGUC
>hsa-mir-129-1 MI0000252
(SEQ ID NO: 868)
GGAUCUUUUUGCGGUCUGGGCUUGCUGUUCCUCUCAACAGUAGUCAGGAAGCCCUUACCCCAAAAAGUAUCU
>hsa-mir-129-2 MI0000473
(SEQ ID NO: 869)
UGCCCUUCGCGAAUCUUUUUGCGGUCUGGGCUUGCUGUACAUAACUCAAUAGCCGGAAGCCCUUACCCCAAAAAGCA
UUUGCGGAGGGCG
>hsa-mir-130a MI0000448
(SEQ ID NO: 870)
UGCUGCUGGCCAGAGCUCUUUUCACAUUGUGCUACUGUCUGCACCUGUCACUAGCAGUGCAAUGUUAAAAGGGCAUU
GGCCGUGUAGUG
>hsa-mir-130b MI0000748
(SEQ ID NO: 871)
GGCCUGCCCGACACUCUUUCCCUGUUGCACUACUAUAGGCCGCUGGGAAGCAGUGCAAUGAUGAAAGGGCAUCGGUC
AGGUC
>hsa-mir-132 MI0000449
(SEQ ID NO: 872)
CCGCCCCCGCGUCUCCAGGGCAACCGUGGCUUUCGAUUGUUACUGUGGGAACUGGAGGUAACAGUCUACAGCCAUGG
UCGCCCCGCAGCACGCCCACGCGC
>hsa-mir-133a-1 MI0000450
(SEQ ID NO: 873)
ACAAUGCUUUGCUAGAGCUGGUAAAAUGGAACCAAAUCGCCUCUUCAAUGGAUUUGGUCCCCUUCAACCAGCUGUAG
CUAUGCAUUGA
>hsa-mir-133a-2 MI0000451
(SEQ ID NO: 874)
GGGAGCCAAAUGCUUUGCUAGAGCUGGUAAAAUGGAACCAAAUCGACUGUCCAAUGGAUUUGGUCCCCUUCAACCAG
CUGUAGCUGUGCAUUGAUGGCGCCG
>hsa-mir-133b MI0000822
(SEQ ID NO: 875)
CCUCAGAAGAAAGAUGCCCCCUGCUCUGGCUGGUCAAACGGAACCAAGUCCGUCUUCCUGAGAGGUUUGGUCCCCUU
CAACCAGCUACAGCAGGGCUGGCAAUGCCCAGUCCUUGGAGA
>hsa-mir-134 MI0000474
(SEQ ID NO: 876)
CAGGGUGUGUGACUGGUUGACCAGAGGGGCAUGCACUGUGUUCACCCUGUGGGCCACCUAGUCACCAACCCUC
>hsa-mir-135a-1 MI0000452
(SEQ ID NO: 877)
AGGCCUCGCUGUUCUCUAUGGCUUUUUAUUCCUAUGUGAUUCUACUGCUCACUCAUAUAGGGAUUGGAGCCGUGGCG
CACGGCGGGGACA
>hsa-mir-135a-2 MI0000453
(SEQ ID NO: 878)
AGAUAAAUUCACUCUAGUGCUUUAUGGCUUUUUAUUCCUAUGUGAUAGUAAUAAAGUCUCAUGUAGGGAUGGAAGCC
AUGAAAUACAUUGUGAAAAAUCA
>hsa-mir-135b MI0000810
(SEQ ID NO: 879)
CACUCUGCUGUGGCCUAUGGCUUUUCAUUCCUAUGUGAUUGCUGUCCCAAACUCAUGUAGGGCUAAAAGCCAUGGGC
UACAGUGAGGGGCGAGCUCC
>hsa-mir-136 MI0000475
(SEQ ID NO: 880)
UGAGCCCUCGGAGGACUCCAUUUGUUUUGAUGAUGGAUUCUUAUGCUCCAUCAUCGUCUCAAAUGAGUCUUCAGAGG
GUUCU
>hsa-mir-137 MI0000454
(SEQ ID NO: 881)
GGUCCUCUGACUCUCUUCGGUGACGGGUAUUCUUGGGUGGAUAAUACGGAUUACGUUGUUAUUGCUUAAGAAUACGC
GUAGUCGAGGAGAGUACCAGCGGCA
>hsa-mir-138-1 MI0000476
(SEQ ID NO: 882)
CCCUGGCAUGGUGUGGUGGGGCAGCUGGUGUUGUGAAUCAGGCCGUUGCCAAUCAGAGAACGGCUACUUCACAACAC
CAGGGCCACACCACACUACAGG
>hsa-mir-138-2 MI0000455
(SEQ ID NO: 883)
CGUUGCUGCAGCUGGUGUUGUGAAUCAGGCCGACGAGCAGCGCAUCCUCUUACCCGGCUAUUUCACGACACCAGGGU
UGCAUCA
>hsa-mir-139 MI0000261
(SEQ ID NO: 884)
GUGUAUUCUACAGUGCACGUGUCUCCAGUGUGGCUCGGAGGCUGGAGACGCGGCCCUGUUGGAGUAAC
>hsa-mir-140 MI0000456
(SEQ ID NO: 885)
UGUGUCUCUCUCUGUGUCCUGCCAGUGGUUUUACCCUAUGGUAGGUUACGUCAUGCUGUUCUACCACAGGGUAGAAC
CACGGACAGGAUACCGGGGCACC
>hsa-mir-141 MI0000457
(SEQ ID NO: 886)
CGGCCGGCCCUGGGUCCAUCUUCCAGUACAGUGUUGGAUGGUCUAAUUGUGAAGCUCCUAACACUGUCUGGUAAAGA
UGGCUCCCGGGUGGGUUC
>hsa-mir-142 MI0000458
(SEQ ID NO: 887)
GACAGUGCAGUCACCCAUAAAGUAGAAAGCACUACUAACAGCACUGGAGGGUGUAGUGUUUCCUACUUUAUGGAUGA
GUGUACUGUG
>hsa-mir-143 MI0000459
(SEQ ID NO: 888)
GCGCAGCGCCCUGUCUCCCAGCCUGAGGUGCAGUGCUGCAUCUCUGGUCAGUUGGGAGUCUGAGAUGAAGCACUGUA
GCUCAGGAAGAGAGAAGUUGUUCUGCAGC
>hsa-mir-144 MI0000460
(SEQ ID NO: 889)
UGGGGCCCUGGCUGGGAUAUCAUCAUAUACUGUAAGUUUGCGAUGAGACACUACAGUAUAGAUGAUGUACUAGUCCG
GGCACCCCC
>hsa-mir-145 MI0000461
(SEQ ID NO: 890)
CACCUUGUCCUCACGGUCCAGUUUUCCCAGGAAUCCCUUAGAUGCUAAGAUGGGGAUUCCUGGAAAUACUGUUCUUG
AGGUCAUGGUU
>hsa-mir-146a MI0000477
(SEQ ID NO: 891)
CCGAUGUGUAUCCUCAGCUUUGAGAACUGAAUUCCAUGGGUUGUGUCAGUGUCAGACCUCUGAAAUUCAGUUCUUCA
GCUGGGAUAUCUCUGUCAUCGU
>hsa-mir-146b MI0003129
(SEQ ID NO: 892)
CCUGGCACUGAGAACUGAAUUCCAUAGGCUGUGAGCUCUAGCAAUGCCCUGUGGACUCAGUUCUGGUGCCCGG
>hsa-mir-147a MI0000262
(SEQ ID NO: 893)
AAUCUAAAGACAACAUUUCUGCACACACACCAGACUAUGGAAGCCAGUGUGUGGAAAUGCUUCUGCUAGAUU
>hsa-mir-147b MI0005544
(SEQ ID NO: 894)
UAUAAAUCUAGUGGAAACAUUUCUGCACAAACUAGAUUCUGGACACCAGUGUGCGGAAAUGCUUCUGCUACAUUUUU
AGG
>hsa-mir-148a MI0000253
(SEQ ID NO: 895)
GAGGCAAAGUUCUGAGACACUCCGACUCUGAGUAUGAUAGAAGUCAGUGCACUACAGAACUUUGUCUC
>hsa-mir-148b MI0000811
(SEQ ID NO: 896)
CAAGCACGAUUAGCAUUUGAGGUGAAGUUCUGUUAUACACUCAGGCUGUGGCUCUCUGAAAGUCAGUGCAUCACAGA
ACUUUGUCUCGAAAGCUUUCUA
>hsa-mir-149 MI0000478
(SEQ ID NO: 897)
GCCGGCGCCCGAGCUCUGGCUCCGUGUCUUCACUCCCGUGCUUGUCCGAGGAGGGAGGGAGGGACGGGGGCUGUGCU
GGGGCAGCUGGA
>hsa-mir-150 MI0000479
(SEQ ID NO: 898)
CUCCCCAUGGCCCUGUCUCCCAACCCUUGUACCAGUGCUGGGCUCAGACCCUGGUACAGGCCUGGGGGACAGGGACC
UGGGGAC
>hsa-mir-151a MI0000809
(SEQ ID NO: 899)
UUUCCUGCCCUCGAGGAGCUCACAGUCUAGUAUGUCUCAUCCCCUACUAGACUGAAGCUCCUUGAGGACAGGGAUGG
UCAUACUCACCUC
>hsa-mir-151b MI0003772
(SEQ ID NO: 900)
ACCUCUGAUGUGUCAGUCUCUCUUCAGGGCUCCCGAGACACAGAAACAGACACCUGCCCUCGAGGAGCUCACAGUCU
AGACAAACAAACCCAGGGU
>hsa-mir-152 MI0000462
(SEQ ID NO: 901)
UGUCCCCCCCGGCCCAGGUUCUGUGAUACACUCCGACUCGGGCUCUGGAGCAGUCAGUGCAUGACAGAACUUGGGCC
CGGAAGGACC
>hsa-mir-153-1 MI0000463
(SEQ ID NO: 902)
CUCACAGCUGCCAGUGUCAUUUUUGUGAUCUGCAGCUAGUAUUCUCACUCCAGUUGCAUAGUCACAAAAGUGAUCAU
UGGCAGGUGUGGC
>hsa-mir-153-2 MI0000464
(SEQ ID NO: 903)
AGCGGUGGCCAGUGUCAUUUUUGUGAUGUUGCAGCUAGUAAUAUGAGCCCAGUUGCAUAGUCACAAAAGUGAUCAUU
GGAAACUGUG
>hsa-mir-154 MI0000480
(SEQ ID NO: 904)
GUGGUACUUGAAGAUAGGUUAUCCGUGUUGCCUUCGCUUUAUUUGUGACGAAUCAUACACGGUUGACCUAUUUUUCA
GUACCAA
>hsa-mir-155 MI0000681
(SEQ ID NO: 905)
CUGUUAAUGCUAAUCGUGAUAGGGGUUUUUGCCUCCAACUGACUCCUACAUAUUAGCAUUAACAG
>hsa-mir-181a-1 MI0000289
(SEQ ID NO: 906)
UGAGUUUUGAGGUUGCUUCAGUGAACAUUCAACGCUGUCGGUGAGUUUGGAAUUAAAAUCAAAACCAUCGACCGUUG
AUUGUACCCUAUGGCUAACCAUCAUCUACUCCA
>hsa-mir-181a-2 MI0000269
(SEQ ID NO: 907)
AGAAGGGCUAUCAGGCCAGCCUUCAGAGGACUCCAAGGAACAUUCAACGCUGUCGGUGAGUUUGGGAUUUGAAAAAA
CCACUGACCGUUGACUGUACCUUGGGGUCCUUA
>hsa-mir-181b-1 MI0000270
(SEQ ID NO: 908)
CCUGUGCAGAGAUUAUUUUUUAAAAGGUCACAAUCAACAUUCAUUGCUGUCGGUGGGUUGAACUGUGUGGACAAGCU
CACUGAACAAUGAAUGCAACUGUGGCCCCGCUU
>hsa-mir-181b-2 MI0000683
(SEQ ID NO: 909)
CUGAUGGCUGCACUCAACAUUCAUUGCUGUCGGUGGGUUUGAGUCUGAAUCAACUCACUGAUCAAUGAAUGCAAACU
GCGGACCAAACA
>hsa-mir-181c MI0000271
(SEQ ID NO: 910)
CGGAAAAUUUGCCAAGGGUUUGGGGGAACAUUCAACCUGUCGGUGAGUUUGGGCAGCUCAGGCAAACCAUCGACCGU
UGAGUGGACCCUGAGGCCUGGAAUUGCCAUCCU
>hsa-mir-181d MI0003139
(SEQ ID NO: 911)
GUCCCCUCCCCUAGGCCACAGCCGAGGUCACAAUCAACAUUCAUUGUUGUCGGUGGGUUGUGAGGACUGAGGCCAGA
CCCACCGGGGGAUGAAUGUCACUGUGGCUGGGCCAGACACGGCUUAAGGGGAAUGGGGAC
>hsa-mir-182 MI0000272
(SEQ ID NO: 912)
GAGCUGCUUGCCUCCCCCCGUUUUUGGCAAUGGUAGAACUCACACUGGUGAGGUAACAGGAUCCGGUGGUUCUAGAC
UUGCCAACUAUGGGGCGAGGACUCAGCCGGCAC
>hsa-mir-183 MI0000273
(SEQ ID NO: 913)
CCGCAGAGUGUGACUCCUGUUCUGUGUAUGGCACUGGUAGAAUUCACUGUGAACAGUCUCAGUCAGUGAAUUACCGA
AGGGCCAUAAACAGAGCAGAGACAGAUCCACGA
>hsa-mir-184 MI0000481
(SEQ ID NO: 914)
CCAGUCACGUCCCCUUAUCACUUUUCCAGCCCAGCUUUGUGACUGUAAGUGUUGGACGGAGAACUGAUAAGGGUAGG
UGAUUGA
>hsa-mir-185 MI0000482
(SEQ ID NO: 915)
AGGGGGCGAGGGAUUGGAGAGAAAGGCAGUUCCUGAUGGUCCCCUCCCCAGGGGCUGGCUUUCCUCUGGUCCUUCCC
UCCCA
>hsa-mir-186 MI0000483
(SEQ ID NO: 916)
UGCUUGUAACUUUCCAAAGAAUUCUCCUUUUGGGCUUUCUGGUUUUAUUUUAAGCCCAAAGGUGAAUUUUUUGGGAA
GUUUGAGCU
>hsa-mir-187 MI0000274
(SEQ ID NO: 917)
GGUCGGGCUCACCAUGACACAGUGUGAGACCUCGGGCUACAACACAGGACCCGGGCGCUGCUCUGACCCCUCGUGUC
UUGUGUUGCAGCCGGAGGGACGCAGGUCCGCA
>hsa-mir-188 MI0000484
(SEQ ID NO: 918)
UGCUCCCUCUCUCACAUCCCUUGCAUGGUGGAGGGUGAGCUUUCUGAAAACCCCUCCCACAUGCAGGGUUUGCAGGA
UGGCGAGCC
>hsa-mir-190a MI0000486
(SEQ ID NO: 919)
UGCAGGCCUCUGUGUGAUAUGUUUGAUAUAUUAGGUUGUUAUUUAAUCCAACUAUAUAUCAAACAUAUUCCUACAGU
GUCUUGCC
>hsa-mir-190b MI0005545
(SEQ ID NO: 920)
UGCUUCUGUGUGAUAUGUUUGAUAUUGGGUUGUUUAAUUAGGAACCAACUAAAUGUCAAACAUAUUCUUACAGCAGC
AG
>hsa-mir-191 MI0000465
(SEQ ID NO: 921)
CGGCUGGACAGCGGGCAACGGAAUCCCAAAAGCAGCUGUUGUCUCCAGAGCAUUCCAGCUGCGCUUGGAUUUCGUCC
CCUGCUCUCCUGCCU
>hsa-mir-192 MI0000234
(SEQ ID NO: 922)
GCCGAGACCGAGUGCACAGGGCUCUGACCUAUGAAUUGACAGCCAGUGCUCUCGUCUCCCCUCUGGCUGCCAAUUCC
AUAGGUCACAGGUAUGUUCGCCUCAAUGCCAGC
>hsa-mir-193a MI0000487
(SEQ ID NO: 923)
CGAGGAUGGGAGCUGAGGGCUGGGUCUUUGCGGGCGAGAUGAGGGUGUCGGAUCAACUGGCCUACAAAGUCCCAGUU
CUCGGCCCCCG
>hsa-mir-193b MI0003137
(SEQ ID NO: 924)
GUGGUCUCAGAAUCGGGGUUUUGAGGGCGAGAUGAGUUUAUGUUUUAUCCAACUGGCCCUCAAAGUCCCGCUUUUGG
GGUCAU
>hsa-mir-194-1 MI0000488
(SEQ ID NO: 925)
AUGGUGUUAUCAAGUGUAACAGCAACUCCAUGUGGACUGUGUACCAAUUUCCAGUGGAGAUGCUGUUACUUUUGAUG
GUUACCAA
>hsa-mir-194-2 MI0000732
(SEQ ID NO: 926)
UGGUUCCCGCCCCCUGUAACAGCAACUCCAUGUGGAAGUGCCCACUGGUUCCAGUGGGGCUGCUGUUAUCUGGGGCG
AGGGCCAG
>hsa-mir-195 MI0000489
(SEQ ID NO: 927)
AGCUUCCCUGGCUCUAGCAGCACAGAAAUAUUGGCACAGGGAAGCGAGUCUGCCAAUAUUGGCUGUGCUGCUCCAGG
CAGGGUGGUG
>hsa-mir-196a-1 MI0000238
(SEQ ID NO: 928)
GUGAAUUAGGUAGUUUCAUGUUGUUGGGCCUGGGUUUCUGAACACAACAACAUUAAACCACCCGAUUCAC
>hsa-mir-196a-2 MI0000279
(SEQ ID NO: 929)
UGCUCGCUCAGCUGAUCUGUGGCUUAGGUAGUUUCAUGUUGUUGGGAUUGAGUUUUGAACUCGGCAACAAGAAACUG
CCUGAGUUACAUCAGUCGGUUUUCGUCGAGGGC
>hsa-mir-196b MI0001150
(SEQ ID NO: 930)
ACUGGUCGGUGAUUUAGGUAGUUUCCUGUUGUUGGGAUCCACCUUUCUCUCGACAGCACGACACUGCCUUCAUUACU
UCAGUUG
>hsa-mir-197 MI0000239
(SEQ ID NO: 931)
GGCUGUGCCGGGUAGAGAGGGCAGUGGGAGGUAAGAGCUCUUCACCCUUCACCACCUUCUCCACCCAGCAUGGCC
>hsa-mir-198 MI0000240
(SEQ ID NO: 932)
UCAUUGGUCCAGAGGGGAGAUAGGUUCCUGUGAUUUUUCCUUCUUCUCUAUAGAAUAAAUGA
>hsa-mir-199a-1 MI0000242
(SEQ ID NO: 933)
GCCAACCCAGUGUUCAGACUACCUGUUCAGGAGGCUCUCAAUGUGUACAGUAGUCUGCACAUUGGUUAGGC
>hsa-mir-199a-2 MI0000281
(SEQ ID NO: 934)
AGGAAGCUUCUGGAGAUCCUGCUCCGUCGCCCCAGUGUUCAGACUACCUGUUCAGGACAAUGCCGUUGUACAGUAGU
CUGCACAUUGGUUAGACUGGGCAAGGGAGAGCA
>hsa-mir-199b MI0000282
(SEQ ID NO: 935)
CCAGAGGACACCUCCACUCCGUCUACCCAGUGUUUAGACUAUCUGUUCAGGACUCCCAAAUUGUACAGUAGUCUGCA
CAUUGGUUAGGCUGGGCUGGGUUAGACCCUCGG
>hsa-mir-200a MI0000737
(SEQ ID NO: 936)
CCGGGCCCCUGUGAGCAUCUUACCGGACAGUGCUGGAUUUCCCAGCUUGACUCUAACACUGUCUGGUAACGAUGUUC
AAAGGUGACCCGC
>hsa-mir-200b MI0000342
(SEQ ID NO: 937)
CCAGCUCGGGCAGCCGUGGCCAUCUUACUGGGCAGCAUUGGAUGGAGUCAGGUCUCUAAUACUGCCUGGUAAUGAUG
ACGGCGGAGCCCUGCACG
>hsa-mir-200c MI0000650
(SEQ ID NO: 938)
CCCUCGUCUUACCCAGCAGUGUUUGGGUGCGGUUGGGAGUCUCUAAUACUGCCGGGUAAUGAUGGAGG
>hsa-mir-202 MI0003130
(SEQ ID NO: 939)
CGCCUCAGAGCCGCCCGCCGUUCCUUUUUCCUAUGCAUAUACUUCUUUGAGGAUCUGGCCUAAAGAGGUAUAGGGCA
UGGGAAAACGGGGCGGUCGGGUCCUCCCCAGCG
>hsa-mir-203 MI0000283
(SEQ ID NO: 940)
GUGUUGGGGACUCGCGCGCUGGGUCCAGUGGUUCUUAACAGUUCAACAGUUCUGUAGCGCAAUUGUGAAAUGUUUAG
GACCACUAGACCCGGCGGGCGCGGCGACAGCGA
>hsa-mir-204 MI0000284
(SEQ ID NO: 941)
GGCUACAGUCUUUCUUCAUGUGACUCGUGGACUUCCCUUUGUCAUCCUAUGCCUGAGAAUAUAUGAAGGAGGCUGGG
AAGGCAAAGGGACGUUCAAUUGUCAUCACUGGC
>hsa-mir-205 MI0000285
(SEQ ID NO: 942)
AAAGAUCCUCAGACAAUCCAUGUGCUUCUCUUGUCCUUCAUUCCACCGGAGUCUGUCUCAUACCCAACCAGAUUUCA
GUGGAGUGAAGUUCAGGAGGCAUGGAGCUGACA
>hsa-mir-206 MI0000490
(SEQ ID NO: 943)
UGCUUCCCGAGGCCACAUGCUUCUUUAUAUCCCCAUAUGGAUUACUUUGCUAUGGAAUGUAAGGAAGUGUGUGGUUU
CGGCAAGUG
>hsa-mir-208a MI0000251
(SEQ ID NO: 944)
UGACGGGCGAGCUUUUGGCCCGGGUUAUACCUGAUGCUCACGUAUAAGACGAGCAAAAAGCUUGUUGGUCA
>hsa-mir-208b MI0005570
(SEQ ID NO: 945)
CCUCUCAGGGAAGCUUUUUGCUCGAAUUAUGUUUCUGAUCCGAAUAUAAGACGAACAAAAGGUUUGUCUGAGGGCAG
>hsa-mir-210 MI0000286
(SEQ ID NO: 946)
ACCCGGCAGUGCCUCCAGGCGCAGGGCAGCCCCUGCCCACCGCACACUGCGCUGCCCCAGACCCACUGUGCGUGUGA
CAGCGGCUGAUCUGUGCCUGGGCAGCGCGACCC
>hsa-mir-211 MI0000287
(SEQ ID NO: 947)
UCACCUGGCCAUGUGACUUGUGGGCUUCCCUUUGUCAUCCUUCGCCUAGGGCUCUGAGCAGGGCAGGGACAGCAAAG
GGGUGCUCAGUUGUCACUUCCCACAGCACGGAG
>hsa-mir-212 MI0000288
(SEQ ID NO: 948)
CGGGGCACCCCGCCCGGACAGCGCGCCGGCACCUUGGCUCUAGACUGCUUACUGCCCGGGCCGCCCUCAGUAACAGU
CUCCAGUCACGGCCACCGACGCCUGGCCCCGCC
>hsa-mir-214 MI0000290
(SEQ ID NO: 949)
GGCCUGGCUGGACAGAGUUGUCAUGUGUCUGCCUGUCUACACUUGCUGUGCAGAACAUCCGCUCACCUGUACAGCAG
GCACAGACAGGCAGUCACAUGACAACCCAGCCU
>hsa-mir-215 MI0000291
(SEQ ID NO: 950)
AUCAUUCAGAAAUGGUAUACAGGAAAAUGACCUAUGAAUUGACAGACAAUAUAGCUGAGUUUGUCUGUCAUUUCUUU
AGGCCAAUAUUCUGUAUGACUGUGCUACUUCAA
>hsa-mir-216a MI0000292
(SEQ ID NO: 951)
GAUGGCUGUGAGUUGGCUUAAUCUCAGCUGGCAACUGUGAGAUGUUCAUACAAUCCCUCACAGUGGUCUCUGGGAUU
AUGCUAAACAGAGCAAUUUCCUAGCCCUCACGA
>hsa-mir-216b MI0005569
(SEQ ID NO: 952)
GCAGACUGGAAAAUCUCUGCAGGCAAAUGUGAUGUCACUGAGGAAAUCACACACUUACCCGUAGAGAUUCUACAGUC
UGACA
>hsa-mir-217 MI0000293
(SEQ ID NO: 953)
AGUAUAAUUAUUACAUAGUUUUUGAUGUCGCAGAUACUGCAUCAGGAACUGAUUGGAUAAGAAUCAGUCACCAUCAG
UUCCUAAUGCAUUGCCUUCAGCAUCUAAACAAG
>hsa-mir-218-1 MI0000294
(SEQ ID NO: 954)
GUGAUAAUGUAGCGAGAUUUUCUGUUGUGCUUGAUCUAACCAUGUGGUUGCGAGGUAUGAGUAAAACAUGGUUCCGU
CAAGCACCAUGGAACGUCACGCAGCUUUCUACA
>hsa-mir-218-2 MI0000295
(SEQ ID NO: 955)
GACCAGUCGCUGCGGGGCUUUCCUUUGUGCUUGAUCUAACCAUGUGGUGGAACGAUGGAAACGGAACAUGGUUCUGU
CAAGCACCGCGGAAAGCACCGUGCUCUCCUGCA
>hsa-mir-219-1 MI0000296
(SEQ ID NO: 956)
CCGCCCCGGGCCGCGGCUCCUGAUUGUCCAAACGCAAUUCUCGAGUCUAUGGCUCCGGCCGAGAGUUGAGUCUGGAC
GUCCCGAGCCGCCGCCCCCAAACCUCGAGCGGG
>hsa-mir-219-2 MI0000740
(SEQ ID NO: 957)
ACUCAGGGGCUUCGCCACUGAUUGUCCAAACGCAAUUCUUGUACGAGUCUGCGGCCAACCGAGAAUUGUGGCUGGAC
AUCUGUGGCUGAGCUCCGGG
>hsa-mir-221 MI0000298
(SEQ ID NO: 958)
UGAACAUCCAGGUCUGGGGCAUGAACCUGGCAUACAAUGUAGAUUUCUGUGUUCGUUAGGCAACAGCUACAUUGUCU
GCUGGGUUUCAGGCUACCUGGAAACAUGUUCUC
>hsa-mir-222 MI0000299
(SEQ ID NO: 959)
GCUGCUGGAAGGUGUAGGUACCCUCAAUGGCUCAGUAGCCAGUGUAGAUCCUGUCUUUCGUAAUCAGCAGCUACAUC
UGGCUACUGGGUCUCUGAUGGCAUCUUCUAGCU
>hsa-mir-223 MI0000300
(SEQ ID NO: 960)
CCUGGCCUCCUGCAGUGCCACGCUCCGUGUAUUUGACAAGCUGAGUUGGACACUCCAUGUGGUAGAGUGUCAGUUUG
UCAAAUACCCCAAGUGCGGCACAUGCUUACCAG
>hsa-mir-224 MI0000301
(SEQ ID NO: 961)
GGGCUUUCAAGUCACUAGUGGUUCCGUUUAGUAGAUGAUUGUGCAUUGUUUCAAAAUGGUGCCCUAGUGACUACAAA
GCCC
>hsa-mir-296 MI0000747
(SEQ ID NO: 962)
AGGACCCUUCCAGAGGGCCCCCCCUCAAUCCUGUUGUGCCUAAUUCAGAGGGUUGGGUGGAGGCUCUCCUGAAGGGC
UCU
>hsa-mir-297 MI0005775
(SEQ ID NO: 963)
UGUAUGUAUGUGUGCAUGUGCAUGUAUGUGUAUAUACAUAUAUAUGUAUUAUGUACUCAUAUAUCA
>hsa-mir-298 MI0005523
(SEQ ID NO: 964)
UCAGGUCUUCAGCAGAAGCAGGGAGGUUCUCCCAGUGGUUUUCCUUGACUGUGAGGAACUAGCCUGCUGCUUUGCUC
AGGAGUGAGCU
>hsa-mir-299 MI0000744
(SEQ ID NO: 965)
AAGAAAUGGUUUACCGUCCCACAUACAUUUUGAAUAUGUAUGUGGGAUGGUAAACCGCUUCUU
>hsa-mir-300 MI0005525
(SEQ ID NO: 966)
UGCUACUUGAAGAGAGGUAAUCCUUCACGCAUUUGCUUUACUUGCAAUGAUUAUACAAGGGCAGACUCUCUCUGGGG
AGCAAA
>hsa-mir-301a MI0000745
(SEQ ID NO: 967)
ACUGCUAACGAAUGCUCUGACUUUAUUGCACUACUGUACUUUACAGCUAGCAGUGCAAUAGUAUUGUCAAAGCAUCU
GAAAGCAGG
>hsa-mir-301b MI0005568
(SEQ ID NO: 968)
GCCGCAGGUGCUCUGACGAGGUUGCACUACUGUGCUCUGAGAAGCAGUGCAAUGAUAUUGUCAAAGCAUCUGGGACCA
>hsa-mir-302a MI0000738
(SEQ ID NO: 969)
CCACCACUUAAACGUGGAUGUACUUGCUUUGAAACUAAAGAAGUAAGUGCUUCCAUGUUUUGGUGAUGG
>hsa-mir-302b MI0000772
(SEQ ID NO: 970)
GCUCCCUUCAACUUUAACAUGGAAGUGCUUUCUGUGACUUUAAAAGUAAGUGCUUCCAUGUUUUAGUAGGAGU
>hsa-mir-302c MI0000773
(SEQ ID NO: 971)
CCUUUGCUUUAACAUGGGGGUACCUGCUGUGUGAAACAAAAGUAAGUGCUUCCAUGUUUCAGUGGAGG
>hsa-mir-302d MI0000774
(SEQ ID NO: 972)
CCUCUACUUUAACAUGGAGGCACUUGCUGUGACAUGACAAAAAUAAGUGCUUCCAUGUUUGAGUGUGG
>hsa-mir-302e MI0006417
(SEQ ID NO: 973)
UUGGGUAAGUGCUUCCAUGCUUCAGUUUCCUUACUGGUAAGAUGGAUGUAGUAAUAGCACCUACCUUAUAGA
>hsa-mir-302f MI0006418
(SEQ ID NO: 974)
UCUGUGUAAACCUGGCAAUUUUCACUUAAUUGCUUCCAUGUUUAUAAAAGA
>hsa-mir-320a MI0000542
(SEQ ID NO: 975)
GCUUCGCUCCCCUCCGCCUUCUCUUCCCGGUUCUUCCCGGAGUCGGGAAAAGCUGGGUUGAGAGGGCGAAAAAGGAU
GAGGU
>hsa-mir-320b-1 MI0003776
(SEQ ID NO: 976)
AAUUAAUCCCUCUCUUUCUAGUUCUUCCUAGAGUGAGGAAAAGCUGGGUUGAGAGGGCAAACAAAUUAACUAAUUAA
UU
>hsa-mir-320b-2 MI0003839
(SEQ ID NO: 977)
UGUUAUUUUUUGUCUUCUACCUAAGAAUUCUGUCUCUUAGGCUUUCUCUUCCCAGAUUUCCCAAAGUUGGGAAAAGC
UGGGUUGAGAGGGCAAAAGGAAAAAAAAAGAAUUCUGUCUCUGACAUAAUUAGAUAGGGAA
>hsa-mir-320c-1 MI0003778
(SEQ ID NO: 978)
UUUGCAUUAAAAAUGAGGCCUUCUCUUCCCAGUUCUUCCCAGAGUCAGGAAAAGCUGGGUUGAGAGGGUAGAAAAAA
AAUGAUGUAGG
>hsa-mir-320c-2 MI0008191
(SEQ ID NO: 979)
CUUCUCUUUCCAGUUCUUCCCAGAAUUGGGAAAAGCUGGGUUGAGAGGGU
>hsa-mir-320d-1 MI0008190
(SEQ ID NO: 980)
UUCUCGUCCCAGUUCUUCCCAAAGUUGAGAAAAGCUGGGUUGAGAGGA
>hsa-mir-320d-2 MI0008192
(SEQ ID NO: 981)
UUCUCUUCCCAGUUCUUCUUGGAGUCAGGAAAAGCUGGGUUGAGAGGA
>hsa-mir-320e MI0014234
(SEQ ID NO: 982)
GCCUUCUCUUCCCAGUUCUUCCUGGAGUCGGGGAAAAGCUGGGUUGAGAAGGU
>hsa-mir-323a MI0000807
(SEQ ID NO: 983)
UUGGUACUUGGAGAGAGGUGGUCCGUGGCGCGUUCGCUUUAUUUAUGGCGCACAUUACACGGUCGACCUCUUUGCAG
UAUCUAAUC
>hsa-mir-323b MI0014206
(SEQ ID NO: 984)
UGGUACUCGGAGGGAGGUUGUCCGUGGUGAGUUCGCAUUAUUUAAUGAUGCCCAAUACACGGUCGACCUCUUUUCGG
UAUCA
>hsa-mir-324 MI0000813
(SEQ ID NO: 985)
CUGACUAUGCCUCCCCGCAUCCCCUAGGGCAUUGGUGUAAAGCUGGAGACCCACUGCCCCAGGUGCUGCUGGGGGUU
GUAGUC
>hsa-mir-325 MI0000824
(SEQ ID NO: 986)
AUACAGUGCUUGGUUCCUAGUAGGUGUCCAGUAAGUGUUUGUGACAUAAUUUGUUUAUUGAGGACCUCCUAUCAAUC
AAGCACUGUGCUAGGCUCUGG
>hsa-mir-326 MI0000808
(SEQ ID NO: 987)
CUCAUCUGUCUGUUGGGCUGGAGGCAGGGCCUUUGUGAAGGCGGGUGGUGCUCAGAUCGCCUCUGGGCCCUUCCUCC
AGCCCCGAGGCGGAUUCA
>hsa-mir-328 MI0000804
(SEQ ID NO: 988)
UGGAGUGGGGGGGCAGGAGGGGCUCAGGGAGAAAGUGCAUACAGCCCCUGGCCCUCUCUGCCCUUCCGUCCCCUG
>hsa-mir-329-1 MI0001725
(SEQ ID NO: 989)
GGUACCUGAAGAGAGGUUUUCUGGGUUUCUGUUUCUUUAAUGAGGACGAAACACACCUGGUUAACCUCUUUUCCAGU
AUC
>hsa-mir-329-2 MI0001726
(SEQ ID NO: 990)
GUGGUACCUGAAGAGAGGUUUUCUGGGUUUCUGUUUCUUUAUUGAGGACGAAACACACCUGGUUAACCUCUUUUCCA
GUAUCAA
>hsa-mir-330 MI0000803
(SEQ ID NO: 991)
CUUUGGCGAUCACUGCCUCUCUGGGCCUGUGUCUUAGGCUCUGCAAGAUCAACCGAGCAAAGCACACGGCCUGCAGA
GAGGCAGCGCUCUGCCC
>hsa-mir-331 MI0000812
(SEQ ID NO: 992)
GAGUUUGGUUUUGUUUGGGUUUGUUCUAGGUAUGGUCCCAGGGAUCCCAGAUCAAACCAGGCCCCUGGGCCUAUCCU
AGAACCAACCUAAGCUC
>hsa-mir-335 MI0000816
(SEQ ID NO: 993)
UGUUUUGAGCGGGGGUCAAGAGCAAUAACGAAAAAUGUUUGUCAUAAACCGUUUUUCAUUAUUGCUCCUGACCUCCU
CUCAUUUGCUAUAUUCA
>hsa-mir-337 MI0000806
(SEQ ID NO: 994)
GUAGUCAGUAGUUGGGGGGUGGGAACGGCUUCAUACAGGAGUUGAUGCACAGUUAUCCAGCUCCUAUAUGAUGCCUU
UCUUCAUCCCCUUCAA
>hsa-mir-338 MI0000814
(SEQ ID NO: 995)
UCUCCAACAAUAUCCUGGUGCUGAGUGAUGACUCAGGCGACUCCAGCAUCAGUGAUUUUGUUGAAGA
>hsa-mir-339 MI0000815
(SEQ ID NO: 996)
CGGGGCGGCCGCUCUCCCUGUCCUCCAGGAGCUCACGUGUGCCUGCCUGUGAGCGCCUCGACGACAGAGCCGGCGCC
UGCCCCAGUGUCUGCGC
>hsa-mir-340 MI0000802
(SEQ ID NO: 997)
UUGUACCUGGUGUGAUUAUAAAGCAAUGAGACUGAUUGUCAUAUGUCGUUUGUGGGAUCCGUCUCAGUUACUUUAUA
GCCAUACCUGGUAUCUUA
>hsa-mir-342 MI0000805
(SEQ ID NO: 998)
GAAACUGGGCUCAAGGUGAGGGGUGCUAUCUGUGAUUGAGGGACAUGGUUAAUGGAAUUGUCUCACACAGAAAUCGC
ACCCGUCACCUUGGCCUACUUA
>hsa-mir-345 MI0000825
(SEQ ID NO: 999)
ACCCAAACCCUAGGUCUGCUGACUCCUAGUCCAGGGCUCGUGAUGGCUGGUGGGCCCUGAACGAGGGGUCUGGAGGC
CUGGGUUUGAAUAUCGACAGC
>hsa-mir-346 MI0000826
(SEQ ID NO: 1000)
GGUCUCUGUGUUGGGCGUCUGUCUGCCCGCAUGCCUGCCUCUCUGUUGCUCUGAAGGAGGCAGGGGCUGGGCCUGCA
GCUGCCUGGGCAGAGCGG
>hsa-mir-361 MI0000760
(SEQ ID NO: 1001)
GGAGCUUAUCAGAAUCUCCAGGGGUACUUUAUAAUUUCAAAAAGUCCCCCAGGUGUGAUUCUGAUUUGCUUC
>hsa-mir-362 MI0000762
(SEQ ID NO: 1002)
CUUGAAUCCUUGGAACCUAGGUGUGAGUGCUAUUUCAGUGCAACACACCUAUUCAAGGAUUCAAA
>hsa-mir-363 MI0000764
(SEQ ID NO: 1003)
UGUUGUCGGGUGGAUCACGAUGCAAUUUUGAUGAGUAUCAUAGGAGAAAAAUUGCACGGUAUCCAUCUGUAAACC
>hsa-mir-365a MI0000767
(SEQ ID NO: 1004)
ACCGCAGGGAAAAUGAGGGACUUUUGGGGGCAGAUGUGUUUCCAUUCCACUAUCAUAAUGCCCCUAAAAAUCCUUAU
UGCUCUUGCA
>hsa-mir-365b MI0000769
(SEQ ID NO: 1005)
AGAGUGUUCAAGGACAGCAAGAAAAAUGAGGGACUUUCAGGGGCAGCUGUGUUUUCUGACUCAGUCAUAAUGCCCCU
AAAAAUCCUUAUUGUUCUUGCAGUGUGCAUCGGG
>hsa-mir-367 MI0000775
(SEQ ID NO: 1006)
CCAUUACUGUUGCUAAUAUGCAACUCUGUUGAAUAUAAAUUGGAAUUGCACUUUAGCAAUGGUGAUGG
>hsa-mir-369 MI0000777
(SEQ ID NO: 1007)
UUGAAGGGAGAUCGACCGUGUUAUAUUCGCUUUAUUGACUUCGAAUAAUACAUGGUUGAUCUUUUCUCAG
>hsa-mir-370 MI0000778
(SEQ ID NO: 1008)
AGACAGAGAAGCCAGGUCACGUCUCUGCAGUUACACAGCUCACGAGUGCCUGCUGGGGUGGAACCUGGUCUGUCU
>hsa-mir-371a MI0000779
(SEQ ID NO: 1009)
GUGGCACUCAAACUGUGGGGGCACUUUCUGCUCUCUGGUGAAAGUGCCGCCAUCUUUUGAGUGUUAC
>hsa-mir-371b MI0017393
(SEQ ID NO: 1010)
GGUAACACUCAAAAGAUGGCGGCACUUUCACCAGAGAGCAGAAAGUGCCCCCACAGUUUGAGUGCC
>hsa-mir-372 MI0000780
(SEQ ID NO: 1011)
GUGGGCCUCAAAUGUGGAGCACUAUUCUGAUGUCCAAGUGGAAAGUGCUGCGACAUUUGAGCGUCAC
>hsa-mir-373 MI0000781
(SEQ ID NO: 1012)
GGGAUACUCAAAAUGGGGGCGCUUUCCUUUUUGUCUGUACUGGGAAGUGCUUCGAUUUUGGGGUGUCCC
>hsa-mir-374a MI0000782
(SEQ ID NO: 1013)
UACAUCGGCCAUUAUAAUACAACCUGAUAAGUGUUAUAGCACUUAUCAGAUUGUAUUGUAAUUGUCUGUGUA
>hsa-mir-374b MI0005566
(SEQ ID NO: 1014)
ACUCGGAUGGAUAUAAUACAACCUGCUAAGUGUCCUAGCACUUAGCAGGUUGUAUUAUCAUUGUCCGUGUCU
>hsa-mir-374c MI0016684
(SEQ ID NO: 1015)
ACACGGACAAUGAUAAUACAACCUGCUAAGUGCUAGGACACUUAGCAGGUUGUAUUAUAUCCAUCCGAGU
>hsa-mir-375 MI0000783
(SEQ ID NO: 1016)
CCCCGCGACGAGCCCCUCGCACAAACCGGACCUGAGCGUUUUGUUCGUUCGGCUCGCGUGAGGC
>hsa-mir-376a-1 MI0000784
(SEQ ID NO: 1017)
UAAAAGGUAGAUUCUCCUUCUAUGAGUACAUUAUUUAUGAUUAAUCAUAGAGGAAAAUCCACGUUUUC
>hsa-mir-376a-2 MI0003529
(SEQ ID NO: 1018)
GGUAUUUAAAAGGUAGAUUUUCCUUCUAUGGUUACGUGUUUGAUGGUUAAUCAUAGAGGAAAAUCCACGUUUUCAGU
AUC
>hsa-mir-376b MI0002466
(SEQ ID NO: 1019)
CAGUCCUUCUUUGGUAUUUAAAACGUGGAUAUUCCUUCUAUGUUUACGUGAUUCCUGGUUAAUCAUAGAGGAAAAUC
CAUGUUUUCAGUAUCAAAUGCUG
>hsa-mir-376c MI0000776
(SEQ ID NO: 1020)
AAAAGGUGGAUAUUCCUUCUAUGUUUAUGUUAUUUAUGGUUAAACAUAGAGGAAAUUCCACGUUUU
>hsa-mir-377 MI0000785
(SEQ ID NO: 1021)
UUGAGCAGAGGUUGCCCUUGGUGAAUUCGCUUUAUUUAUGUUGAAUCACACAAAGGCAACUUUUGUUUG
>hsa-mir-378a MI0000786
(SEQ ID NO: 1022)
AGGGCUCCUGACUCCAGGUCCUGUGUGUUACCUAGAAAUAGCACUGGACUUGGAGUCAGAAGGCCU
>hsa-mir-378b MI0014154
(SEQ ID NO: 1023)
GGUCAUUGAGUCUUCAAGGCUAGUGGAAAGAGCACUGGACUUGGAGGCAGAAAGACC
>hsa-mir-378c MI0015825
(SEQ ID NO: 1024)
GGAGGCCAUCACUGGACUUGGAGUCAGAAGAGUGGAGUCGGGUCAGACUUCAACUCUGACUUUGAAGGUGGUGAGUG
CCUC
>hsa-mir-378d-1 MI0016749
(SEQ ID NO: 1025)
ACUGUUUCUGUCCUUGUUCUUGUUGUUAUUACUGGACUUGGAGUCAGAAACAGG
>hsa-mir-378d-2 MI0003840
(SEQ ID NO: 1026)
GAAUGGUUACAAGGAGAGAACACUGGACUUGGAGUCAGAAAACUUUCAUCCAAGUCAUUCCCUGCUCUAAGUCCCAU
UUCUGUUCCAUGAGAUUGUUU
>hsa-mir-378e MI0016750
(SEQ ID NO: 1027)
CUGACUCCAGUGUCCAGGCCAGGGGCAGACAGUGGACAGAGAACAGUGCCCAAGACCACUGGACUUGGAGUCAGGAC
AU
>hsa-mir-378f MI0016756
(SEQ ID NO: 1028)
GUCAGGUCCUGGACUCCCAUAGUUUUCAGGCUGCUAAACAACAGAACGAGCACUGGACUUGGAGCCAGAAGUCUUGGG
>hsa-mir-378g MI0016761
(SEQ ID NO: 1029)
CACUGGGCUUGGAGUCAGAAGACCUGGCUCCAGCCCAGCUC
>hsa-mir-378h MI0016808
(SEQ ID NO: 1030)
ACAGGAACACUGGACUUGGUGUCAGAUGGGAUGAGCCCUGGCUCUGUUUCCUAGCAGCAAUCUGAUCUUGAGCUAGU
CACUGG
>hsa-mir-378i MI0016902
(SEQ ID NO: 1031)
GGGAGCACUGGACUAGGAGUCAGAAGGUGGAGUUCUGGGUGCUGUUUUCCCACUCUUGGGCCCUGGGCAUGUUCUG
>hsa-mir-379 MI0000787
(SEQ ID NO: 1032)
AGAGAUGGUAGACUAUGGAACGUAGGCGUUAUGAUUUCUGACCUAUGUAACAUGGUCCACUAACUCU
>hsa-mir-380 MI0000788
(SEQ ID NO: 1033)
AAGAUGGUUGACCAUAGAACAUGCGCUAUCUCUGUGUCGUAUGUAAUAUGGUCCACAUCUU
>hsa-mir-381 MI0000789
(SEQ ID NO: 1034)
UACUUAAAGCGAGGUUGCCCUUUGUAUAUUCGGUUUAUUGACAUGGAAUAUACAAGGGCAAGCUCUCUGUGAGUA
>hsa-mir-382 MI0000790
(SEQ ID NO: 1035)
UACUUGAAGAGAAGUUGUUCGUGGUGGAUUCGCUUUACUUAUGACGAAUCAUUCACGGACAACACUUUUUUCAGUA
>hsa-mir-383 MI0000791
(SEQ ID NO: 1036)
CUCCUCAGAUCAGAAGGUGAUUGUGGCUUUGGGUGGAUAUUAAUCAGCCACAGCACUGCCUGGUCAGAAAGAG
>hsa-mir-384 MI0001145
(SEQ ID NO: 1037)
UGUUAAAUCAGGAAUUUUAAACAAUUCCUAGACAAUAUGUAUAAUGUUCAUAAGUCAUUCCUAGAAAUUGUUCAUAA
UGCCUGUAACA
>hsa-mir-409 MI0001735
(SEQ ID NO: 1038)
UGGUACUCGGGGAGAGGUUACCCGAGCAACUUUGCAUCUGGACGACGAAUGUUGCUCGGUGAACCCCUUUUCGGUAU
CA
>hsa-mir-410 MI0002465
(SEQ ID NO: 1039)
GGUACCUGAGAAGAGGUUGUCUGUGAUGAGUUCGCUUUUAUUAAUGACGAAUAUAACACAGAUGGCCUGUUUUCAGU
ACC
>hsa-mir-411 MI0003675
(SEQ ID NO: 1040)
UGGUACUUGGAGAGAUAGUAGACCGUAUAGCGUACGCUUUAUCUGUGACGUAUGUAACACGGUCCACUAACCCUCAG
UAUCAAAUCCAUCCCCGAG
>hsa-mir-412 MI0002464
(SEQ ID NO: 1041)
CUGGGGUACGGGGAUGGAUGGUCGACCAGUUGGAAAGUAAUUGUUUCUAAUGUACUUCACCUGGUCCACUAGCCGUC
CGUAUCCGCUGCAG
>hsa-mir-421 MI0003685
(SEQ ID NO: 1042)
GCACAUUGUAGGCCUCAUUAAAUGUUUGUUGAAUGAAAAAAUGAAUCAUCAACAGACAUUAAUUGGGCGCCUGCUCU
GUGAUCUC
>hsa-mir-422a MI0001444
(SEQ ID NO: 1043)
GAGAGAAGCACUGGACUUAGGGUCAGAAGGCCUGAGUCUCUCUGCUGCAGAUGGGCUCUCUGUCCCUGAGCCAAGCU
UUGUCCUCCCUGG
>hsa-mir-423 MI0001445
(SEQ ID NO: 1044)
AUAAAGGAAGUUAGGCUGAGGGGCAGAGAGCGAGACUUUUCUAUUUUCCAAAAGCUCGGUCUGAGGCCCCUCAGUCU
UGCUUCCUAACCCGCGC
>hsa-mir-424 MI0001446
(SEQ ID NO: 1045)
CGAGGGGAUACAGCAGCAAUUCAUGUUUUGAAGUGUUCUAAAUGGUUCAAAACGUGAGGCGCUGCUAUACCCCCUCG
UGGGGAAGGUAGAAGGUGGGG
>hsa-mir-425 MI0001448
(SEQ ID NO: 1046)
GAAAGCGCUUUGGAAUGACACGAUCACUCCCGUUGAGUGGGCACCCGAGAAGCCAUCGGGAAUGUCGUGUCCGCCCA
GUGCUCUUUC
>hsa-mir-429 MI0001641
(SEQ ID NO: 1047)
CGCCGGCCGAUGGGCGUCUUACCAGACAUGGUUAGACCUGGCCCUCUGUCUAAUACUGUCUGGUAAAACCGUCCAUC
CGCUGC
>hsa-mir-431 MI0001721
(SEQ ID NO: 1048)
UCCUGCUUGUCCUGCGAGGUGUCUUGCAGGCCGUCAUGCAGGCCACACUGACGGUAACGUUGCAGGUCGUCUUGCAG
GGCUUCUCGCAAGACGACAUCCUCAUCACCAACGACG
>hsa-mir-432 MI0003133
(SEQ ID NO: 1049)
UGACUCCUCCAGGUCUUGGAGUAGGUCAUUGGGUGGAUCCUCUAUUUCCUUACGUGGGCCACUGGAUGGCUCCUCCA
UGUCUUGGAGUAGAUCA
>hsa-mir-433 MI0001723
(SEQ ID NO: 1050)
CCGGGGAGAAGUACGGUGAGCCUGUCAUUAUUCAGAGAGGCUAGAUCCUCUGUGUUGAGAAGGAUCAUGAUGGGCUC
CUCGGUGUUCUCCAGG
>hsa-mir-448 MI0001637
(SEQ ID NO: 1051)
GCCGGGAGGUUGAACAUCCUGCAUAGUGCUGCCAGGAAAUCCCUAUUUCAUAUAAGAGGGGGCUGGCUGGUUGCAUA
UGUAGGAUGUCCCAUCUCCCAGCCCACUUCGUCA
>hsa-mir-449a MI0001648
(SEQ ID NO: 1052)
CUGUGUGUGAUGAGCUGGCAGUGUAUUGUUAGCUGGUUGAAUAUGUGAAUGGCAUCGGCUAACAUGCAACUGCUGUC
UUAUUGCAUAUACA
>hsa-mir-449b MI0003673
(SEQ ID NO: 1053)
UGACCUGAAUCAGGUAGGCAGUGUAUUGUUAGCUGGCUGCUUGGGUCAAGUCAGCAGCCACAACUACCCUGCCACUU
GCUUCUGGAUAAAUUCUUCU
>hsa-mir-449c MI0003823
(SEQ ID NO: 1054)
GCUGGGAUGUGUCAGGUAGGCAGUGUAUUGCUAGCGGCUGUUAAUGAUUUUAACAGUUGCUAGUUGCACUCCUCUCU
GUUGCAUUCAGAAGC
>hsa-mir-450a-1 MI0001652
(SEQ ID NO: 1055)
AAACGAUACUAAACUGUUUUUGCGAUGUGUUCCUAAUAUGCACUAUAAAUAUAUUGGGAACAUUUUGCAUGUAUAGU
UUUGUAUCAAUAUA
>hsa-mir-450a-2 MI0003187
(SEQ ID NO: 1056)
CCAAAGAAAGAUGCUAAACUAUUUUUGCGAUGUGUUCCUAAUAUGUAAUAUAAAUGUAUUGGGGACAUUUUGCAUUC
AUAGUUUUGUAUCAAUAAUAUGG
>hsa-mir-450b MI0005531
(SEQ ID NO: 1057)
GCAGAAUUAUUUUUGCAAUAUGUUCCUGAAUAUGUAAUAUAAGUGUAUUGGGAUCAUUUUGCAUCCAUAGUUUUGUAU
>hsa-mir-451a MI0001729
(SEQ ID NO: 1058)
CUUGGGAAUGGCAAGGAAACCGUUACCAUUACUGAGUUUAGUAAUGGUAAUGGUUCUCUUGCUAUACCCAGA
>hsa-mir-451b MI0017360
(SEQ ID NO: 1059)
UGGGUAUAGCAAGAGAACCAUUACCAUUACUAAACUCAGUAAUGGUAACGGUUUCCUUGCCAUUCCCA
>hsa-mir-452 MI0001733
(SEQ ID NO: 1060)
GCUAAGCACUUACAACUGUUUGCAGAGGAAACUGAGACUUUGUAACUAUGUCUCAGUCUCAUCUGCAAAGAAGUAAG
UGCUUUGC
>hsa-mir-454 MI0003820
(SEQ ID NO: 1061)
UCUGUUUAUCACCAGAUCCUAGAACCCUAUCAAUAUUGUCUCUGCUGUGUAAAUAGUUCUGAGUAGUGCAAUAUUGC
UUAUAGGGUUUUGGUGUUUGGAAAGAACAAUGGGCAGG
>hsa-mir-455 MI0003513
(SEQ ID NO: 1062)
UCCCUGGCGUGAGGGUAUGUGCCUUUGGACUACAUCGUGGAAGCCAGCACCAUGCAGUCCAUGGGCAUAUACACUUG
CCUCAAGGCCUAUGUCAUC
>hsa-mir-466 MI0014157
(SEQ ID NO: 1063)
GUGUGUGUAUAUGUGUGUUGCAUGUGUGUAUAUGUGUGUAUAUAUGUACACAUACACAUACACGCAACACACAUAUA
UACAUGC
>hsa-mir-483 MI0002467
(SEQ ID NO: 1064)
GAGGGGGAAGACGGGAGGAAAGAAGGGAGUGGUUCCAUCACGCCUCCUCACUCCUCUCCUCCCGUCUUCUCCUCUC
>hsa-mir-484 MI0002468
(SEQ ID NO: 1065)
AGCCUCGUCAGGCUCAGUCCCCUCCCGAUAAACCCCUAAAUAGGGACUUUCCCGGGGGGUGACCCUGGCUUUUUUGG
CG
>hsa-mir-485 MI0002469
(SEQ ID NO: 1066)
ACUUGGAGAGAGGCUGGCCGUGAUGAAUUCGAUUCAUCAAAGCGAGUCAUACACGGCUCUCCUCUCUUUUAGU
>hsa-mir-486 MI0002470
(SEQ ID NO: 1067)
GCAUCCUGUACUGAGCUGCCCCGAGGCCCUUCAUGCUGCCCAGCUCGGGGCAGCUCAGUACAGGAUAC
>hsa-mir-487a MI0002471
(SEQ ID NO: 1068)
GGUACUUGAAGAGUGGUUAUCCCUGCUGUGUUCGCUUAAUUUAUGACGAAUCAUACAGGGACAUCCAGUUUUUCAGU
AUC
>hsa-mir-487b MI0003530
(SEQ ID NO: 1069)
UUGGUACUUGGAGAGUGGUUAUCCCUGUCCUGUUCGUUUUGCUCAUGUCGAAUCGUACAGGGUCAUCCACUUUUUCA
GUAUCAA
>hsa-mir-488 MI0003123
(SEQ ID NO: 1070)
GAGAAUCAUCUCUCCCAGAUAAUGGCACUCUCAAACAAGUUUCCAAAUUGUUUGAAAGGCUAUUUCUUGGUCAGAUG
ACUCUC
>hsa-mir-489 MI0003124
(SEQ ID NO: 1071)
GUGGCAGCUUGGUGGUCGUAUGUGUGACGCCAUUUACUUGAACCUUUAGGAGUGACAUCACAUAUACGGCAGCUAAA
CUGCUAC
>hsa-mir-490 MI0003125
(SEQ ID NO: 1072)
UGGAGGCCUUGCUGGUUUGGAAAGUUCAUUGUUCGACACCAUGGAUCUCCAGGUGGGUCAAGUUUAGAGAUGCACCA
ACCUGGAGGACUCCAUGCUGUUGAGCUGUUCACAAGCAGCGGACACUUCCA
>hsa-mir-491 MI0003126
(SEQ ID NO: 1073)
UUGACUUAGCUGGGUAGUGGGGAACCCUUCCAUGAGGAGUAGAACACUCCUUAUGCAAGAUUCCCUUCUACCUGGCU
GGGUUGG
>hsa-mir-492 MI0003131
(SEQ ID NO: 1074)
CAACUACAGCCACUACUACAGGACCAUCGAGGACCUGCGGGACAAGAUUCUUGGUGCCACCAUUGAGAACGCCAGGA
UUGUCCUGCAGAUCAACAAUGCUCAACUGGCUGCAGAUG
>hsa-mir-493 MI0003132
(SEQ ID NO: 1075)
CUGGCCUCCAGGGCUUUGUACAUGGUAGGCUUUCAUUCAUUCGUUUGCACAUUCGGUGAAGGUCUACUGUGUGCCAG
GCCCUGUGCCAG
>hsa-mir-494 MI0003134
(SEQ ID NO: 1076)
GAUACUCGAAGGAGAGGUUGUCCGUGUUGUCUUCUCUUUAUUUAUGAUGAAACAUACACGGGAAACCUCUUUUUUAG
UAUC
>hsa-mir-495 MI0003135
(SEQ ID NO: 1077)
UGGUACCUGAAAAGAAGUUGCCCAUGUUAUUUUCGCUUUAUAUGUGACGAAACAAACAUGGUGCACUUCUUUUUCGG
UAUCA
>hsa-mir-496 MI0003136
(SEQ ID NO: 1078)
CCCAAGUCAGGUACUCGAAUGGAGGUUGUCCAUGGUGUGUUCAUUUUAUUUAUGAUGAGUAUUACAUGGCCAAUCUC
CUUUCGGUACUCAAUUCUUCUUGGG
>hsa-mir-497 MI0003138
(SEQ ID NO: 1079)
CCACCCCGGUCCUGCUCCCGCCCCAGCAGCACACUGUGGUUUGUACGGCACUGUGGCCACGUCCAAACCACACUGUG
GUGUUAGAGCGAGGGUGGGGGAGGCACCGCCGAGG
>hsa-mir-498 MI0003142
(SEQ ID NO: 1080)
AACCCUCCUUGGGAAGUGAAGCUCAGGCUGUGAUUUCAAGCCAGGGGGCGUUUUUCUAUAACUGGAUGAAAAGCACC
UCCAGAGCUUGAAGCUCACAGUUUGAGAGCAAUCGUCUAAGGAAGUU
>hsa-mir-499a MI0003183
(SEQ ID NO: 1081)
GCCCUGUCCCCUGUGCCUUGGGCGGGCGGCUGUUAAGACUUGCAGUGAUGUUUAACUCCUCUCCACGUGAACAUCAC
AGCAAGUCUGUGCUGCUUCCCGUCCCUACGCUGCCUGGGCAGGGU
>hsa-mir-499b MI0017396
(SEQ ID NO: 1082)
GGAAGCAGCACAGACUUGCUGUGAUGUUCACGUGGAGAGGAGUUAAACAUCACUGCAAGUCUUAACAGCCGCC
>hsa-mir-500a MI0003184
(SEQ ID NO: 1083)
GCUCCCCCUCUCUAAUCCUUGCUACCUGGGUGAGAGUGCUGUCUGAAUGCAAUGCACCUGGGCAAGGAUUCUGAGAG
CGAGAGC
>hsa-mir-500b MI0015903
(SEQ ID NO: 1084)
CCCCCUCUCUAAUCCUUGCUACCUGGGUGAGAGUGCUUUCUGAAUGCAGUGCACCCAGGCAAGGAUUCUGCAAGGGG
GA
>hsa-mir-501 MI0003185
(SEQ ID NO: 1085)
GCUCUUCCUCUCUAAUCCUUUGUCCCUGGGUGAGAGUGCUUUCUGAAUGCAAUGCACCCGGGCAAGGAUUCUGAGAG
GGUGAGC
>hsa-mir-502 MI0003186
(SEQ ID NO: 1086)
UGCUCCCCCUCUCUAAUCCUUGCUAUCUGGGUGCUAGUGCUGGCUCAAUGCAAUGCACCUGGGCAAGGAUUCAGAGA
GGGGGAGCU
>hsa-mir-503 MI0003188
(SEQ ID NO: 1087)
UGCCCUAGCAGCGGGAACAGUUCUGCAGUGAGCGAUCGGUGCUCUGGGGUAUUGUUUCCGCUGCCAGGGUA
>hsa-mir-504 MI0003189
(SEQ ID NO: 1088)
GCUGCUGUUGGGAGACCCUGGUCUGCACUCUAUCUGUAUUCUUACUGAAGGGAGUGCAGGGCAGGGUUUCCCAUACA
GAGGGC
>hsa-mir-505 MI0003190
(SEQ ID NO: 1089)
GAUGCACCCAGUGGGGGAGCCAGGAAGUAUUGAUGUUUCUGCCAGUUUAGCGUCAACACUUGCUGGUUUCCUCUCUG
GAGCAUC
>hsa-mir-506 MI0003193
(SEQ ID NO: 1090)
GCCACCACCAUCAGCCAUACUAUGUGUAGUGCCUUAUUCAGGAAGGUGUUACUUAAUAGAUUAAUAUUUGUAAGGCA
CCCUUCUGAGUAGAGUAAUGUGCAACAUGGACAACAUUUGUGGUGGC
>hsa-mir-507 MI0003194
(SEQ ID NO: 1091)
GUGCUGUGUGUAGUGCUUCACUUCAAGAAGUGCCAUGCAUGUGUCUAGAAAUAUGUUUUGCACCUUUUGGAGUGAAA
UAAUGCACAACAGAUAC
>hsa-mir-508 MI0003195
(SEQ ID NO: 1092)
CCACCUUCAGCUGAGUGUAGUGCCCUACUCCAGAGGGCGUCACUCAUGUAAACUAAAACAUGAUUGUAGCCUUUUGG
AGUAGAGUAAUACACAUCACGUAACGCAUAUUUGGUGG
>hsa-mir-509-1 MI0003196
(SEQ ID NO: 1093)
CAUGCUGUGUGUGGUACCCUACUGCAGACAGUGGCAAUCAUGUAUAAUUAAAAAUGAUUGGUACGUCUGUGGGUAGA
GUACUGCAUGACACAUG
>hsa-mir-509-2 MI0005530
(SEQ ID NO: 1094)
CAUGCUGUGUGUGGUACCCUACUGCAGACAGUGGCAAUCAUGUAUAAUUAAAAAUGAUUGGUACGUCUGUGGGUAGA
GUACUGCAUGACAC
>hsa-mir-509-3 MI0005717
(SEQ ID NO: 1095)
GUGGUACCCUACUGCAGACGUGGCAAUCAUGUAUAAUUAAAAAUGAUUGGUACGUCUGUGGGUAGAGUACUGCAU
>hsa-mir-510 MI0003197
(SEQ ID NO: 1096)
GUGGUGUCCUACUCAGGAGAGUGGCAAUCACAUGUAAUUAGGUGUGAUUGAAACCUCUAAGAGUGGAGUAACAC
>hsa-mir-511-1 MI0003127
(SEQ ID NO: 1097)
CAAUAGACACCCAUCGUGUCUUUUGCUCUGCAGUCAGUAAAUAUUUUUUUGUGAAUGUGUAGCAAAAGACAGAAUGG
UGGUCCAUUG
>hsa-mir-511-2 MI0003128
(SEQ ID NO: 1098)
CAAUAGACACCCAUCGUGUCUUUUGCUCUGCAGUCAGUAAAUAUUUUUUUGUGAAUGUGUAGCAAAAGACAGAAUGG
UGGUCCAUUG
>hsa-mir-512-1 MI0003140
(SEQ ID NO: 1099)
UCUCAGUCUGUGGCACUCAGCCUUGAGGGCACUUUCUGGUGCCAGAAUGAAAGUGCUGUCAUAGCUGAGGUCCAAUG
ACUGAGG
>hsa-mir-512-2 MI0003141
(SEQ ID NO: 1100)
GGUACUUCUCAGUCUGUGGCACUCAGCCUUGAGGGCACUUUCUGGUGCCAGAAUGAAAGUGCUGUCAUAGCUGAGGU
CCAAUGACUGAGGCGAGCACC
>hsa-mir-513a-1 MI0003191
(SEQ ID NO: 1101)
GGGAUGCCACAUUCAGCCAUUCAGCGUACAGUGCCUUUCACAGGGAGGUGUCAUUUAUGUGAACUAAAAUAUAAAUU
UCACCUUUCUGAGAAGGGUAAUGUACAGCAUGCACUGCAUAUGUGGUGUCCC
>hsa-mir-513a-2 MI0003192
(SEQ ID NO: 1102)
GGAUGCCACAUUCAGCCAUUCAGUGUGCAGUGCCUUUCACAGGGAGGUGUCAUUUAUGUGAACUAAAAUAUAAAUUU
CACCUUUCUGAGAAGGGUAAUGUACAGCAUGCACUGCAUAUGUGGUGUCC
>hsa-mir-513b MI0006648
(SEQ ID NO: 1103)
GUGUACAGUGCCUUUCACAAGGAGGUGUCAUUUAUGUGAACUAAAAUAUAAAUGUCACCUUUUUGAGAGGAGUAAUG
UACAGCA
>hsa-mir-513c MI0006649
(SEQ ID NO: 1104)
GCGUACAGUGCCUUUCUCAAGGAGGUGUCGUUUAUGUGAACUAAAAUAUAAAUUUCACCUUUCUGAGAAGAGUAAUG
UACAGCA
>hsa-mir-514a-1 MI0003198
(SEQ ID NO: 1105)
AACAUGUUGUCUGUGGUACCCUACUCUGGAGAGUGACAAUCAUGUAUAAUUAAAUUUGAUUGACACUUCUGUGAGUA
GAGUAACGCAUGACACGUACG
>hsa-mir-514a-2 MI0003199
(SEQ ID NO: 1106)
GUUGUCUGUGGUACCCUACUCUGGAGAGUGACAAUCAUGUAUAACUAAAUUUGAUUGACACUUCUGUGAGUAGAGUA
ACGCAUGACAC
>hsa-mir-514a-3 MI0003200
(SEQ ID NO: 1107)
GUUGUCUGUGGUACCCUACUCUGGAGAGUGACAAUCAUGUAUAACUAAAUUUGAUUGACACUUCUGUGAGUAGAGUA
ACGCAUGACAC
>hsa-mir-514b MI0014251
(SEQ ID NO: 1108)
CAUGUGGUACUCUUCUCAAGAGGGAGGCAAUCAUGUGUAAUUAGAUAUGAUUGACACCUCUGUGAGUGGAGUAACAC
AUG
>hsa-mir-515-1 MI0003144
(SEQ ID NO: 1109)
UCUCAUGCAGUCAUUCUCCAAAAGAAAGCACUUUCUGUUGUCUGAAAGCAGAGUGCCUUCUUUUGGAGCGUUACUGU
UUGAGA
>hsa-mir-515-2 MI0003147
(SEQ ID NO: 1110)
UCUCAUGCAGUCAUUCUCCAAAAGAAAGCACUUUCUGUUGUCUGAAAGCAGAGUGCCUUCUUUUGGAGCGUUACUGU
UUGAGA
>hsa-mir-516a-1 MI0003180
(SEQ ID NO: 1111)
UCUCAGGCUGUGACCUUCUCGAGGAAAGAAGCACUUUCUGUUGUCUGAAAGAAAAGAAAGUGCUUCCUUUCAGAGGG
UUACGGUUUGAGA
>hsa-mir-516a-2 MI0003181
(SEQ ID NO: 1112)
UCUCAGGUUGUGACCUUCUCGAGGAAAGAAGCACUUUCUGUUGUCUGAAAGAAAAGAAAGUGCUUCCUUUCAGAGGG
UUACGGUUUGAGA
>hsa-mir-516b-1 MI0003172
(SEQ ID NO: 1113)
UCUCAGGCUGUGACCAUCUGGAGGUAAGAAGCACUUUCUGUUUUGUGAAAGAAAAGAAAGUGCUUCCUUUCAGAGGG
UUACUCUUUGAGA
>hsa-mir-516b-2 MI0003167
(SEQ ID NO: 1114)
UCUCAUGAUGUGACCAUCUGGAGGUAAGAAGCACUUUGUGUUUUGUGAAAGAAAGUGCUUCCUUUCAGAGGGUUACU
CUUUGAGA
>hsa-mir-517a MI0003161
(SEQ ID NO: 1115)
UCUCAGGCAGUGACCCUCUAGAUGGAAGCACUGUCUGUUGUAUAAAAGAAAAGAUCGUGCAUCCCUUUAGAGUGUUA
CUGUUUGAGA
>hsa-mir-517b MI0003165
(SEQ ID NO: 1116)
GUGACCCUCUAGAUGGAAGCACUGUCUGUUGUCUAAGAAAAGAUCGUGCAUCCCUUUAGAGUGUUAC
>hsa-mir-517c MI0003174
(SEQ ID NO: 1117)
GAAGAUCUCAGGCAGUGACCCUCUAGAUGGAAGCACUGUCUGUUGUCUAAGAAAAGAUCGUGCAUCCUUUUAGAGUG
UUACUGUUUGAGAAAAUC
>hsa-mir-518a-1 MI0003170
(SEQ ID NO: 1118)
UCUCAAGCUGUGACUGCAAAGGGAAGCCCUUUCUGUUGUCUGAAAGAAGAGAAAGCGCUUCCCUUUGCUGGAUUACG
GUUUGAGA
>hsa-mir-518a-2 MI0003173
(SEQ ID NO: 1119)
UCUCAAGCUGUGGGUCUGCAAAGGGAAGCCCUUUCUGUUGUCUAAAAGAAGAGAAAGCGCUUCCCUUUGCUGGAUUA
CGGUUUGAGA
>hsa-mir-518b MI0003156
(SEQ ID NO: 1120)
UCAUGCUGUGGCCCUCCAGAGGGAAGCGCUUUCUGUUGUCUGAAAGAAAACAAAGCGCUCCCCUUUAGAGGUUUACG
GUUUGA
>hsa-mir-518c MI0003159
(SEQ ID NO: 1121)
GCGAGAAGAUCUCAUGCUGUGACUCUCUGGAGGGAAGCACUUUCUGUUGUCUGAAAGAAAACAAAGCGCUUCUCUUU
AGAGUGUUACGGUUUGAGAAAAGC
>hsa-mir-518d MI0003171
(SEQ ID NO: 1122)
UCCCAUGCUGUGACCCUCUAGAGGGAAGCACUUUCUGUUGUCUGAAAGAAACCAAAGCGCUUCCCUUUGGAGCGUUA
CGGUUUGAGA
>hsa-mir-518e MI0003169
(SEQ ID NO: 1123)
UCUCAGGCUGUGACCCUCUAGAGGGAAGCGCUUUCUGUUGGCUAAAAGAAAAGAAAGCGCUUCCCUUCAGAGUGUUA
ACGCUUUGAGA
>hsa-mir-518f MI0003154
(SEQ ID NO: 1124)
UCUCAUGCUGUGACCCUCUAGAGGGAAGCACUUUCUCUUGUCUAAAAGAAAAGAAAGCGCUUCUCUUUAGAGGAUUA
CUCUUUGAGA
>hsa-mir-519a-1 MI0003178
(SEQ ID NO: 1125)
CUCAGGCUGUGACACUCUAGAGGGAAGCGCUUUCUGUUGUCUGAAAGAAAGGAAAGUGCAUCCUUUUAGAGUGUUAC
UGUUUGAG
>hsa-mir-519a-2 MI0003182
(SEQ ID NO: 1126)
UCUCAGGCUGUGUCCCUCUACAGGGAAGCGCUUUCUGUUGUCUGAAAGAAAGGAAAGUGCAUCCUUUUAGAGUGUUA
CUGUUUGAGA
>hsa-mir-519b MI0003151
(SEQ ID NO: 1127)
CAUGCUGUGACCCUCUAGAGGGAAGCGCUUUCUGUUGUCUGAAAGAAAAGAAAGUGCAUCCUUUUAGAGGUUUACUG
UUUG
>hsa-mir-519c MI0003148
(SEQ ID NO: 1128)
UCUCAGCCUGUGACCCUCUAGAGGGAAGCGCUUUCUGUUGUCUGAAAGAAAAGAAAGUGCAUCUUUUUAGAGGAUUA
CAGUUUGAGA
>hsa-mir-519d MI0003162
(SEQ ID NO: 1129)
UCCCAUGCUGUGACCCUCCAAAGGGAAGCGCUUUCUGUUUGUUUUCUCUUAAACAAAGUGCCUCCCUUUAGAGUGUU
ACCGUUUGGGA
>hsa-mir-519e MI0003145
(SEQ ID NO: 1130)
UCUCAUGCAGUCAUUCUCCAAAAGGGAGCACUUUCUGUUUGAAAGAAAACAAAGUGCCUCCUUUUAGAGUGUUACUG
UUUGAGA
>hsa-mir-520a MI0003149
(SEQ ID NO: 1131)
CUCAGGCUGUGACCCUCCAGAGGGAAGUACUUUCUGUUGUCUGAGAGAAAAGAAAGUGCUUCCCUUUGGACUGUUUC
GGUUUGAG
>hsa-mir-520b MI0003155
(SEQ ID NO: 1132)
CCCUCUACAGGGAAGCGCUUUCUGUUGUCUGAAAGAAAAGAAAGUGCUUCCUUUUAGAGGG
>hsa-mir-520c MI0003158
(SEQ ID NO: 1133)
UCUCAGGCUGUCGUCCUCUAGAGGGAAGCACUUUCUGUUGUCUGAAAGAAAAGAAAGUGCUUCCUUUUAGAGGGUUA
CCGUUUGAGA
>hsa-mir-520d MI0003164
(SEQ ID NO: 1134)
UCUCAAGCUGUGAGUCUACAAAGGGAAGCCCUUUCUGUUGUCUAAAAGAAAAGAAAGUGCUUCUCUUUGGUGGGUUA
CGGUUUGAGA
>hsa-mir-520e MI0003143
(SEQ ID NO: 1135)
UCUCCUGCUGUGACCCUCAAGAUGGAAGCAGUUUCUGUUGUCUGAAAGGAAAGAAAGUGCUUCCUUUUUGAGGGUUA
CUGUUUGAGA
>hsa-mir-520f MI0003146
(SEQ ID NO: 1136)
UCUCAGGCUGUGACCCUCUAAAGGGAAGCGCUUUCUGUGGUCAGAAAGAAAAGCAAGUGCUUCCUUUUAGAGGGUUA
CCGUUUGGGA
>hsa-mir-520g MI0003166
(SEQ ID NO: 1137)
UCCCAUGCUGUGACCCUCUAGAGGAAGCACUUUCUGUUUGUUGUCUGAGAAAAAACAAAGUGCUUCCCUUUAGAGUG
UUACCGUUUGGGA
>hsa-mir-520h MI0003175
(SEQ ID NO: 1138)
UCCCAUGCUGUGACCCUCUAGAGGAAGCACUUUCUGUUUGUUGUCUGAGAAAAAACAAAGUGCUUCCCUUUAGAGUU
ACUGUUUGGGA
>hsa-mir-521-1 MI0003176
(SEQ ID NO: 1139)
UCUCAGGCUGUGACCCUCCAAAGGGAAGAACUUUCUGUUGUCUAAAAGAAAAGAACGCACUUCCCUUUAGAGUGUUA
CCGUGUGAGA
>hsa-mir-521-2 MI0003163
(SEQ ID NO: 1140)
UCUCGGGCUGUGACUCUCCAAAGGGAAGAAUUUUCUCUUGUCUAAAAGAAAAGAACGCACUUCCCUUUAGAGUGUUA
CCGUGUGAGA
>hsa-mir-522 MI0003177
(SEQ ID NO: 1141)
UCUCAGGCUGUGUCCCUCUAGAGGGAAGCGCUUUCUGUUGUCUGAAAGAAAAGAAAAUGGUUCCCUUUAGAGUGUUA
CGCUUUGAGA
>hsa-mir-523 MI0003153
(SEQ ID NO: 1142)
UCUCAUGCUGUGACCCUCUAGAGGGAAGCGCUUUCUGUUGUCUGAAAGAAAAGAACGCGCUUCCCUAUAGAGGGUUA
CCCUUUGAGA
>hsa-mir-524 MI0003160
(SEQ ID NO: 1143)
UCUCAUGCUGUGACCCUACAAAGGGAAGCACUUUCUCUUGUCCAAAGGAAAAGAAGGCGCUUCCCUUUGGAGUGUUA
CGGUUUGAGA
>hsa-mir-525 MI0003152
(SEQ ID NO: 1144)
CUCAAGCUGUGACUCUCCAGAGGGAUGCACUUUCUCUUAUGUGAAAAAAAAGAAGGCGCUUCCCUUUAGAGCGUUAC
GGUUUGGG
>hsa-mir-526a-1 MI0003157
(SEQ ID NO: 1145)
CUCAGGCUGUGACCCUCUAGAGGGAAGCACUUUCUGUUGCUUGAAAGAAGAGAAAGCGCUUCCUUUUAGAGGAUUAC
UCUUUGAG
>hsa-mir-526a-2 MI0003168
(SEQ ID NO: 1146)
GUGACCCUCUAGAGGGAAGCACUUUCUGUUGAAAGAAAAGAACAUGCAUCCUUUCAGAGGGUUAC
>hsa-mir-526b MI0003150
(SEQ ID NO: 1147)
UCAGGCUGUGACCCUCUUGAGGGAAGCACUUUCUGUUGUCUGAAAGAAGAGAAAGUGCUUCCUUUUAGAGGCUUACU
GUCUGA
>hsa-mir-527 MI0003179
(SEQ ID NO: 1148)
UCUCAAGCUGUGACUGCAAAGGGAAGCCCUUUCUGUUGUCUAAAAGAAAAGAAAGUGCUUCCCUUUGGUGAAUUACG
GUUUGAGA
>hsa-mir-532 MI0003205
(SEQ ID NO: 1149)
CGACUUGCUUUCUCUCCUCCAUGCCUUGAGUGUAGGACCGUUGGCAUCUUAAUUACCCUCCCACACCCAAGGCUUGC
AAAAAAGCGAGCCU
>hsa-mir-539 MI0003514
(SEQ ID NO: 1150)
AUACUUGAGGAGAAAUUAUCCUUGGUGUGUUCGCUUUAUUUAUGAUGAAUCAUACAAGGACAAUUUCUUUUUGAGUAU
>hsa-mir-541 MI0005539
(SEQ ID NO: 1151)
ACGUCAGGGAAAGGAUUCUGCUGUCGGUCCCACUCCAAAGUUCACAGAAUGGGUGGUGGGCACAGAAUCUGGACUCU
GCUUGUG
>hsa-mir-542 MI0003686
(SEQ ID NO: 1152)
CAGAUCUCAGACAUCUCGGGGAUCAUCAUGUCACGAGAUACCAGUGUGCACUUGUGACAGAUUGAUAACUGAAAGGU
CUGGGAGCCACUCAUCUUCA
>hsa-mir-543 MI0005565
(SEQ ID NO: 1153)
UACUUAAUGAGAAGUUGCCCGUGUUUUUUUCGCUUUAUUUGUGACGAAACAUUCGCGGUGCACUUCUUUUUCAGUAUC
>hsa-mir-544a MI0003515
(SEQ ID NO: 1154)
AUUUUCAUCACCUAGGGAUCUUGUUAAAAAGCAGAUUCUGAUUCAGGGACCAAGAUUCUGCAUUUUUAGCAAGUUCU
CAAGUGAUGCUAAU
>hsa-mir-544b MI0014159
(SEQ ID NO: 1155)
GGAAUUUUGUUAAAAUGCAGAAUCCAUUUCUGUAGCUCUGAGACUAGACCUGAGGUUGUGCAUUUCUAACAAAGUGCC
>hsa-mir-545 MI0003516
(SEQ ID NO: 1156)
CCCAGCCUGGCACAUUAGUAGGCCUCAGUAAAUGUUUAUUAGAUGAAUAAAUGAAUGACUCAUCAGCAAACAUUUAU
UGUGUGCCUGCUAAAGUGAGCUCCACAGG
>hsa-mir-548a-1 MI0003593
(SEQ ID NO: 1157)
UGCAGGGAGGUAUUAAGUUGGUGCAAAAGUAAUUGUGAUUUUUGCCAUUAAAAGUAACGACAAAACUGGCAAUUACU
UUUGCACCAAACCUGGUAUU
>hsa-mir-548a-2 MI0003598
(SEQ ID NO: 1158)
UGUGAUGUGUAUUAGGUUUGUGCAAAAGUAAUUGGGGUUUUUUGCCGUUAAAAGUAAUGGCAAAACUGGCAAUUACU
UUUGCACCAAACUAAUAUAA
>hsa-mir-548a-3 MI0003612
(SEQ ID NO: 1159)
CCUAGAAUGUUAUUAGGUCGGUGCAAAAGUAAUUGCGAGUUUUACCAUUACUUUCAAUGGCAAAACUGGCAAUUACU
UUUGCACCAACGUAAUACUU
>hsa-mir-548aa-1 MI0016689
(SEQ ID NO: 1160)
CUUUAUUAGUCUGGUGCAAAAGAAACUGUGGUUUUUGCCAUUACUUUUACAGGCAAAAACCACAAUUACUUUUGCAC
CAACCUAAUAUAACUUGUUU
>hsa-mir-548aa-2 MI0016690
(SEQ ID NO: 1161)
UUUUAUUAGGUUGGUGCAAAAGAAACUGUGGUUUUUGCCAUUACUUUCAAUGGCAAAAACCACAAUUACUUUUGCAC
CAACCUAAAUCUUCCCUCUC
>hsa-mir-548ab MI0016752
(SEQ ID NO: 1162)
AUGUUGGUGCAAAAGUAAUUGUGGAUUUUGCUAUUACUUGUAUUUAUUUGUAAUGCAAAACCCGCAAUUAGUUUUGC
ACCAACC
>hsa-mir-548ac MI0016762
(SEQ ID NO: 1163)
GUAUUAGGUUGGUGCAAAAGUUAUUGUGGUUUUUGCUAUUUUUUUUUAAUGGCAAAAACCGGCAAUUACUUUUGCAC
UAACCUAGUAG
>hsa-mir-548ad MI0016770
(SEQ ID NO: 1164)
CUGUUAGGUUGGUGCAAAAGUAAUUGUGGUUUUUGAAAGUAACUUGGCGAAAACGACAAUGACUUUUGCACCAAUCU
AAUAC
>hsa-mir-548ae-1 MI0016779
(SEQ ID NO: 1165)
GCAGUUUUUGCCAUUAAGUUGCGGUUUUUGCCAUUAUAAUGGCAAAAACUGCAAUUACUUUCACACCUGC
>hsa-mir-548ae-2 MI0016780
(SEQ ID NO: 1166)
UGUGCAAAAGUAAUUGUGGUUUUUGUCAUUUAAAAGUAAUGGCAAAAACUGCAAUUACUUUCACACC
>hsa-mir-548ag-1 MI0016793
(SEQ ID NO: 1167)
GUGCAAAGGUAAUUGUGGUUUCUGCUUUUAAAGGUAAUGGCAAAUAUUACAUUUACUUUUGCACCA
>hsa-mir-548ag-2 MI0016794
(SEQ ID NO: 1168)
UGCAAAGGUAAUUGUGGUUUCUGCCAUUGAAAGUAAAGGCAAGAACCUCAAUUACCUUUGCAGC
>hsa-mir-548ah MI0016796
(SEQ ID NO: 1169)
AGGUUGGUGCAAAAGUGAUUGCAGUGUUUGCCAAUAAAAGUAAUGACAAAAACUGCAGUUACUUUUGCACCAGCCC
>hsa-mir-548ai MI0016813
(SEQ ID NO: 1170)
GUAUUAGGUUGGUGCAAAGGUAAUUGCAGUUUUUCCCAUUUAAAAUAUGGAAAAAAAAAUCACAAUUACUUUUGCAU
CAACCUAAUAA
>hsa-mir-548aj-1 MI0016814
(SEQ ID NO: 1171)
AUUGGUGUAAAAGUAAUUGCAGGUUAUGCCAUUAAAAGUAAUGGUAAAAACUGCAAUUACUUUUACACUAAC
>hsa-mir-548aj-2 MI0016815
(SEQ ID NO: 1172)
AAGGUAUUAGGUUGGUGCAAAAGUAAUUGCAGUUUUUGCUAUUACUUUUAAUGGUAAAAACUGCAAUUACUUUUACA
CCAACCUAAUAUUUA
>hsa-mir-548ak MI0016840
(SEQ ID NO: 1173)
GUGCAAAAGUAACUGCGGUUUUUGAGAAGUAAUUGAAAACCGCAAUUACUUUUGCAG
>hsa-mir-548a1 MI0016851
(SEQ ID NO: 1174)
GGUCGGUGCAAAAGUAAUUGCUGUUUUUGCCAUUAAAAAUAAUGGCAUUAAAAGUAAUGGCAAAAACGGCAAUGACU
UUUGUACCAAUCUAAUAUCU
>hsa-mir-548am MI0016904
(SEQ ID NO: 1175)
AGUUGGUGCAAAAGUAAUUGCGGUUUUUGCCGUCGAAAAUAAUGGCAAAAACUGCAGUUACUUUUGUACCAAUG
>hsa-mir-548an MI0016907
(SEQ ID NO: 1176)
CAUUAGGUUGGUGCAAAAGGCAUUGUGGUUUUUGCCUAUAAAAGUAAUGGCAAAAACCGCAAUUCCUUUUGCACCAA
CCUAAU
>hsa-mir-548ao MI0017871
(SEQ ID NO: 1177)
AACUAUUCUUAGGUUGAUGCAGAAGUAACUACGGUUUUUGCAGUUGAAAGUAAUGGCAAAGACCGUGACUACUUUUG
CAACAGCCUAAUAGUUUCU
>hsa-mir-548ap MI0017875
(SEQ ID NO: 1178)
ACCAAUUCCUAGGUUGGUGCAAAAGUAAUUGCGGUCUUUGUCAUUAAAACCAAUAACAAAAACCACAAUUACUUUUU
ACUGACCUAAAGAUUAAUU
>hsa-mir-548aq MI0019130
(SEQ ID NO: 1179)
GAAAGUAAUUGCUGUUUUUGCCAUUACUUUCAGUGGCAAAAACUGCAAUUACUUUUGC
>hsa-mir-548ar MI0019131
(SEQ ID NO: 1180)
AAAAGUAAUUGCAGUUUUUGCUGUUGAACGUAGUGGUAAAACUGCAGUUAUUUUUGC
>hsa-mir-548as MI0019132
(SEQ ID NO: 1181)
AAAAGUAAUUGCGGGUUUUGCCGUUGCUUUUAAUGGUAAAACCCACAAUUAUGUUUGU
>hsa-mir-548at MI0019137
(SEQ ID NO: 1182)
AAAAGUUAUUGCGGUUUUGGCUGCCAAAAGAAAUGGCCAAAACCGCAGUAACUUUUGU
>hsa-mir-548au MI0019145
(SEQ ID NO: 1183)
AAAAGUAAUUGCGGUUUUUGCUAUUGGUUUUAAUGGCAGUUACUUUUGCACCAG
>hsa-mir-548av MI0019152
(SEQ ID NO: 1184)
AAAAGUACUUGCGGAUUUGCCAUCACCUUUACCUUUAAUGGCAAAACUGCAGUUACUUUUGC
>hsa-mir-548aw MI0019283
(SEQ ID NO: 1185)
UAGGUCGGUGCAAAAGUCAUCACGGUUUUUACCAUUAAAACCGCGAUGACUUUUGCAUCAACCUA
>hsa-mir-548ax MI0019286
(SEQ ID NO: 1186)
GAUUGGUGCAGAAGUAAUUGCGGUUUUGCCAUGGAAAGUAAUGGCAAAAACCGUAAUUACUUUUGUACCAACC
>hsa-mir-548b MI0003596
(SEQ ID NO: 1187)
CAGACUAUAUAUUUAGGUUGGCGCAAAAGUAAUUGUGGUUUUGGCCUUUAUUUUCAAUGGCAAGAACCUCAGUUGCU
UUUGUGCCAACCUAAUACUU
>hsa-mir-548c MI0003630
(SEQ ID NO: 1188)
CAUUGGCAUCUAUUAGGUUGGUGCAAAAGUAAUUGCGGUUUUUGCCAUUACUUUCAGUAGCAAAAAUCUCAAUUACU
UUUGCACCAACUUAAUACUU
>hsa-mir-548d-1 MI0003668
(SEQ ID NO: 1189)
AAACAAGUUAUAUUAGGUUGGUGCAAAAGUAAUUGUGGUUUUUGCCUGUAAAAGUAAUGGCAAAAACCACAGUUUCU
UUUGCACCAGACUAAUAAAG
>hsa-mir-548d-2 MI0003671
(SEQ ID NO: 1190)
GAGAGGGAAGAUUUAGGUUGGUGCAAAAGUAAUUGUGGUUUUUGCCAUUGAAAGUAAUGGCAAAAACCACAGUUUCU
UUUGCACCAACCUAAUAAAA
>hsa-mir-548e MI0006344
(SEQ ID NO: 1191)
UUAUUAGGUUGGUACAAAAGCAAUCGCGGUUUUUGCUAUUACUUUUAAAGGCAAAAACUGAGACUACUUUUGCACCA
ACCUGAUAGAA
>hsa-mir-548f-1 MI0006374
(SEQ ID NO: 1192)
AUUAGGUUGGUGCAAAAGUAAUCACAGUUUUUGACAUUACUUUCAAAGACAAAAACUGUAAUUACUUUUGGACCAAC
CUAAUAG
>hsa-mir-548f-2 MI0006375
(SEQ ID NO: 1193)
UAAUAACUAUUAGGUUGGUGCGAACAUAAUUGCAGUUUUUAUCAUUACUUUUAAUGGCAAAAACUGUAAUUACUUUU
GCACCAACCUAAUAUUUUAGU
>hsa-mir-548f-3 MI0006376
(SEQ ID NO: 1194)
AUUAGGUUGGUGCAAACCUAAUUGCAAUUUUUGCAGUUUUUUUAAGUAAUUGCAAAAACUGUAAUUACUUUUGCACC
AACCUAAUAC
>hsa-mir-548f-4 MI0006377
(SEQ ID NO: 1195)
GAGUUCUAACGUAUUAGGUUGGUGCAAAAGUAAUAGUGGUUUUUGCCAUUAAAAGUAAUGACAAAAACUGUAAUUAC
UUUUGGAACAAUAUUAAUAGAAUUUCAG
>hsa-mir-548f-5 MI0006378
(SEQ ID NO: 1196)
UAUUAGGUUGCUGCAAAAGUAAUCAUGUUUUUUUCCAUUGUAAGUAAUGGGAAAAACUGUAAUUACUUUUGUACCAA
CCUAAUAGC
>hsa-mir-548g MI0006395
(SEQ ID NO: 1197)
AGUUAUUAGAUUAGUGCAAAAGUAAUUGCAGUUUUUGCAUUACGUUCUAUGGCAAAACUGUAAUUACUUUUGUACCA
ACAUAAUACUUC
>hsa-mir-548h-1 MI0006411
(SEQ ID NO: 1198)
UCUGUCCAUUAGGUGGGUGCAAAAGUAAUCGCGGUUUUUGUCAUUACUUUUAAUGGUAAAAACUGGAAUUACUUUUG
CACUGACCUAAUAUUAAGCCAGAUA
>hsa-mir-548h-2 MI0006412
(SEQ ID NO: 1199)
GUAUUAGGUUGGUGCAAAAGUAAUCGCGGUUUUUGUCAUUACUUUCAAUGGCAAACACCACAAUUACUUUUGCACCA
ACCUAAUAUAA
>hsa-mir-548h-3 MI0006413
(SEQ ID NO: 1200)
UCUGAUUCUGCAUGUAUUAGGUUGGUGCAAAAGUAAUCGCGGUUUUUGUCAUUGAAAGUAAUAGCAAAAACUGCAAU
UACUUUUGCACCAACCUAAAAGUAGUCACUGUCUUCAGAUA
>hsa-mir-548h-4 MI0006414
(SEQ ID NO: 1201)
GCUAUUAGGUUGGUGCAAAAGUAAUCGCGGUUUUUGUCAUUACUUUAAUUACUUUACGUUUCAUUAAUGACAAAAAC
CGCAAUUACUUUUGCACCAACCUAAUACUUGCUA
>hsa-mir-548h-5 MI0016751
(SEQ ID NO: 1202)
ACAAAAGUAAUCGCGGUUUUUGUCAUUACUUUUAACUGUAAAAACCACGGUUGCUUUUGC
>hsa-mir-548i-1 MI0006421
(SEQ ID NO: 1203)
CAGAUGGCUCUGAAGUUUGCACCCUAUUAGGUUGGUGCAAAAGUAAUUGCGGAUUUUGCCAUUAAAAGUAAUGGCAA
AAAUAGCAAUUAUUUUUGUACCAGCCUAGUAUCUUUUCUCCUUCUACCAAACUUUGUCCCUGAGCCAUCUCA
>hsa-mir-548i-2 MI0006422
(SEQ ID NO: 1204)
UAGAUGGCUCCGAAGUUUGCAUCCUAUUAGUUUGGUGCAAAAGUAAUUGCGGAUUUUGCCAUUAAAAGUAAUGGCAA
AAAUAGCAAUUAUUUUUGUACCAGCCUAGUAUCUUUUCUCCUUCUAACAAAGUUCGUCCCUGAUCCAUCUCA
>hsa-mir-548i-3 MI0006423
(SEQ ID NO: 1205)
CAGAUGGCUCCGAAGUUUACAUCCUAUUAGGUUUGUGCAAAAGUAAUUGCGGAUUUUGCCAUUAAAAGUAAUGGCAA
AAAUAGCAAUUAUUUUUGUACCAGCCUAGUAUCUUUUCUCCUUCUACCAAACUUUGUCCCUGAGCCAUCUCA
>hsa-mir-548i-4 MI0006424
(SEQ ID NO: 1206)
AGGUUGGUGCAAAAGUAAUUGCGGAUUUUGCCAUACUUUUAACGGCAAAAACCACAAAUAUUAUUGCACCAACCUAU
>hsa-mir-548j MI0006345
(SEQ ID NO: 1207)
GGGCAGCCAGUGAAUAGUUAGCUGGUGCAAAAGUAAUUGCGGUCUUUGGUAUUACUUUCAGUGGCAAAAACUGCAUU
ACUUUUGCACCAGCCUACUAGAACGCUGAGUUCAG
>hsa-mir-548k MI0006354
(SEQ ID NO: 1208)
CUUUUCUCAAGUAUUGCUGUUAGGUUGGUGCAAAAGUACUUGCGGAUUUUGCUUUACUUUUAAUGGCAAAAACCGCA
AUUAUUUUUGCUUCAACCUAAUAUGAUGCAAAAUUGGCU
>hsa-mir-5481 MI0006361
(SEQ ID NO: 1209)
UAUUAGGUUGGUGCAAAAGUAUUUGCGGGUUUUGUCGUAGAAAGUAAUGGCAAAAACUGCAGUUACUUGUGCACCAA
CCAAAUGCU
>hsa-mir-548m MI0006400
(SEQ ID NO: 1210)
AUAUUAGGUUGGUGCAAAGGUAUUUGUGGUUUUUGUCAUUAAAGUAAUGCAAAAGCCACAAAUACCUUUGCACCAAC
CUAAUAUUA
>hsa-mir-548n MI0006399
(SEQ ID NO: 1211)
AGGUUGGUGCAAAAGUAAUUGUGGAUUUUGUCGUUAAAAAUAGCAAAACCCGCAAUUACUUUUGCACCAACCUAA
>hsa-mir-548o MI0006402
(SEQ ID NO: 1212)
UGGUGAAAAUGUGUUGAUUGUAAUGGUUCCUAUUCUGAUCAAUAAACAUGGUUUGAGCCUAGUUACAAUGAUCUAAA
AUUCACGGUCCAAAACUGCAGUUACUUUUGCACCAAC
>hsa-mir-548o-2 MI0016746
(SEQ ID NO: 1213)
UGGUGCAAAAGUAAUUGCGGUUUUUGCCAUUAAAAGUAAUGCGGCCAAAACUGCAGUUACUUUUGCACCC
>hsa-mir-548p MI0006420
(SEQ ID NO: 1214)
AUUAGGUUGGUAUAAAAUUAAUUGCAGUUUUUGUCAUUACUUUCAAUAGCAAAAACUGCAGUUACUUUUGCACCAAU
GUAAUAC
>hsa-mir-548q MI0010637
(SEQ ID NO: 1215)
AUAUUAGGCUGGUGCAAAAGUAAUGGCGGUUUUUGCCAUUACUUUUCAUUUUUACCAUUAAAAGUAAUGGCAAAAAG
CAUGAUUACUUUUUCACCAACCU
>hsa-mir-548s MI0014141
(SEQ ID NO: 1216)
UUGCUGCAAAAAUAAUUGCAGUUUUUGCCAUUAUUUUUAAUAAUUAUAAUAAUGGCCAAAACUGCAGUUAUUUUUGC
ACCAA
>hsa-mir-548t MI0014164
(SEQ ID NO: 1217)
AGGGUGGUGCAAAAGUGAUCGUGGUUUUUGCAAUUUUUUAAUGACAAAAACCACAAUUACUUUUGCACCAACCU
>hsa-mir-548u MI0014168
(SEQ ID NO: 1218)
AUUAGGAUGGUGCAAAAGUAAUGUGGUUUUUUUCUUUACUUUUAAUGGCAAAGACUGCAAUUACUUUUGCGCCAACC
UAAU
>hsa-mir-548v MI0014174
(SEQ ID NO: 1219)
AAUACUAGGUUUGAGCAAAAGUAAUUGCGGUUUUGCCAUCAUGCCAAAAGCUACAGUUACUUUUGCACCAGCCUAAU
AUU
>hsa-mir-548w MI0014222
(SEQ ID NO: 1220)
GGUUGGUGCAAAAGUAACUGCGGUUUUUGCCUUUCAACAUAAUGGCAAAACCCACAAUUACUUUUGCACCAAUC
>hsa-mir-548x MI0014244
(SEQ ID NO: 1221)
AGGUUAGUGCAAAAGUAAUUGCAGUUUUUGCGUUACUUUCAAUCGUAAAAACUGCAAUUACUUUCACACCAAUCU
>hsa-mir-548x-2 MI0016833
(SEQ ID NO: 1222)
AUGCCAAAUAUUAGGUUGGCACAAAAGUAAUUGUGGCUUUUGCCAUUAAAAGUAAUGGUAAAAACUGCAAUUACUUU
CGUGCCAACCUAAUAUUUGUGUG
>hsa-mir-548y MI0016595
(SEQ ID NO: 1223)
GCCUAAACUAUUAGGUUGGUGCAAAAGUAAUCACUGUUUUUGCCAUUACUCUCAGUGGCAAAAACCGUGAUUACUUU
UGCACCAACCUAGUAACACCUUCACUGUGGGGG
>hsa-mir-548z MI0016688
(SEQ ID NO: 1224)
AAGUAUUAAGUUGGUGCAAAAGUAAUUGAGAUUUUUGCUACUGAAAGUAAUGGCAAAAACCGCAAUUACUUUUGCAC
CAACCUAAUAGAUGCCAAUG
>hsa-mir-549 MI0003679
(SEQ ID NO: 1225)
AGACAUGCAACUCAAGAAUAUAUUGAGAGCUCAUCCAUAGUUGUCACUGUCUCAAAUCAGUGACAACUAUGGAUGAG
CUCUUAAUAUAUCCCAGGC
>hsa-mir-550a-1 MI0003600
(SEQ ID NO: 1226)
UGAUGCUUUGCUGGCUGGUGCAGUGCCUGAGGGAGUAAGAGCCCUGUUGUUGUAAGAUAGUGUCUUACUCCCUCAGG
CACAUCUCCAACAAGUCUCU
>hsa-mir-550a-2 MI0003601
(SEQ ID NO: 1227)
UGAUGCUUUGCUGGCUGGUGCAGUGCCUGAGGGAGUAAGAGCCCUGUUGUUGUCAGAUAGUGUCUUACUCCCUCAGG
CACAUCUCCAGCGAGUCUCU
>hsa-mir-550a-3 MI0003762
(SEQ ID NO: 1228)
GAUGCUUUGCUGGCUGGUGCAGUGCCUGAGGGAGUAAGAGUCCUGUUGUUGUAAGAUAGUGUCUUACUCCCUCAGGC
ACAUCUCCAACAAGUCUC
>hsa-mir-550b-1 MI0016686
(SEQ ID NO: 1229)
AGAGACUUGUUGGAGAUGUGCCUGAGGGAGUAAGACACUAUCUUACAACAACAGGGCUCUUACUCCCUCAGGCACUG
CACCAGCCAGCAAAGCAUCA
>hsa-mir-550b-2 MI0016687
(SEQ ID NO: 1230)
AGAGACUCGCUGGAGAUGUGCCUGAGGGAGUAAGACACUAUCUGACAACAACAGGGCUCUUACUCCCUCAGGCACUG
CACCAGCCAGCAAAGCAUCA
>hsa-mir-551a MI0003556
(SEQ ID NO: 1231)
GGGGACUGCCGGGUGACCCUGGAAAUCCAGAGUGGGUGGGGCCAGUCUGACCGUUUCUAGGCGACCCACUCUUGGUU
UCCAGGGUUGCCCUGGAAA
>hsa-mir-551b MI0003575
(SEQ ID NO: 1232)
AGAUGUGCUCUCCUGGCCCAUGAAAUCAAGCGUGGGUGAGACCUGGUGCAGAACGGGAAGGCGACCCAUACUUGGUU
UCAGAGGCUGUGAGAAUAA
>hsa-mir-552 MI0003557
(SEQ ID NO: 1233)
AACCAUUCAAAUAUACCACAGUUUGUUUAACCUUUUGCCUGUUGGUUGAAGAUGCCUUUCAACAGGUGACUGGUUAG
ACAAACUGUGGUAUAUACA
>hsa-mir-553 MI0003558
(SEQ ID NO: 1234)
CUUCAAUUUUAUUUUAAAACGGUGAGAUUUUGUUUUGUCUGAGAAAAUCUCGCUGUUUUAGACUGAGG
>hsa-mir-554 MI0003559
(SEQ ID NO: 1235)
ACCUGAGUAACCUUUGCUAGUCCUGACUCAGCCAGUACUGGUCUUAGACUGGUGAUGGGUCAGGGUUCAUAUUUUGG
CAUCUCUCUCUGGGCAUCU
>hsa-mir-555 MI0003561
(SEQ ID NO: 1236)
GGAGUGAACUCAGAUGUGGAGCACUACCUUUGUGAGCAGUGUGACCCAAGGCCUGUGGACAGGGUAAGCUGAACCUC
UGAUAAAACUCUGAUCUAU
>hsa-mir-556 MI0003562
(SEQ ID NO: 1237)
GAUAGUAAUAAGAAAGAUGAGCUCAUUGUAAUAUGAGCUUCAUUUAUACAUUUCAUAUUACCAUUAGCUCAUCUUUU
UUAUUACUACCUUCAACA
>hsa-mir-557 MI0003563
(SEQ ID NO: 1238)
AGAAUGGGCAAAUGAACAGUAAAUUUGGAGGCCUGGGGCCCUCCCUGCUGCUGGAGAAGUGUUUGCACGGGUGGGCC
UUGUCUUUGAAAGGAGGUGGA
>hsa-mir-558 MI0003564
(SEQ ID NO: 1239)
GUGUGUGUGUGUGUGUGUGGUUAUUUUGGUAUAGUAGCUCUAGACUCUAUUAUAGUUUCCUGAGCUGCUGUACCAAA
AUACCACAAACGGGCUG
>hsa-mir-559 MI0003565
(SEQ ID NO: 1240)
GCUCCAGUAACAUCUUAAAGUAAAUAUGCACCAAAAUUACUUUUGGUAAAUACAGUUUUGGUGCAUAUUUACUUUAG
GAUGUUACUGGAGCUCCCA
>hsa-mir-561 MI0003567
(SEQ ID NO: 1241)
CUUCAUCCACCAGUCCUCCAGGAACAUCAAGGAUCUUAAACUUUGCCAGAGCUACAAAGGCAAAGUUUAAGAUCCUU
GAAGUUCCUGGGGGAACCAU
>hsa-mir-562 MI0003568
(SEQ ID NO: 1242)
AGUGAAAUUGCUAGGUCAUAUGGUCAGUCUACUUUUAGAGUAAUUGUGAAACUGUUUUUCAAAGUAGCUGUACCAUU
UGCACUCCCUGUGGCAAU
>hsa-mir-563 MI0003569
(SEQ ID NO: 1243)
AGCAAAGAAGUGUGUUGCCCUCUAGGAAAUGUGUGUUGCUCUGAUGUAAUUAGGUUGACAUACGUUUCCCUGGUAGC
CA
>hsa-mir-564 MI0003570
(SEQ ID NO: 1244)
CGGGCAGCGGGUGCCAGGCACGGUGUCAGCAGGCAACAUGGCCGAGAGGCCGGGGCCUCCGGGCGGCGCCGUGUCCG
CGACCGCGUACCCUGAC
>hsa-mir-566 MI0003572
(SEQ ID NO: 1245)
GCUAGGCGUGGUGGCGGGCGCCUGUGAUCCCAACUACUCAGGAGGCUGGGGCAGCAGAAUCGCUUGAACCCGGGAGG
CGAAGGUUGCAGUGAGC
>hsa-mir-567 MI0003573
(SEQ ID NO: 1246)
GGAUUCUUAUAGGACAGUAUGUUCUUCCAGGACAGAACAUUCUUUGCUAUUUUGUACUGGAAGAACAUGCAAAACUA
AAAAAAAAAAAAGUUAUUGCU
>hsa-mir-568 MI0003574
(SEQ ID NO: 1247)
GAUAUACACUAUAUUAUGUAUAAAUGUAUACACACUUCCUAUAUGUAUCCACAUAUAUAUAGUGUAUAUAUUAUACA
UGUAUAGGUGUGUAUAUG
>hsa-mir-569 MI0003576
(SEQ ID NO: 1248)
GGUAUUGUUAGAUUAAUUUUGUGGGACAUUAACAACAGCAUCAGAAGCAACAUCAGCUUUAGUUAAUGAAUCCUGGA
AAGUUAAGUGACUUUAUUU
>hsa-mir-570 MI0003577
(SEQ ID NO: 1249)
CUAGAUAAGUUAUUAGGUGGGUGCAAAGGUAAUUGCAGUUUUUCCCAUUAUUUUAAUUGCGAAAACAGCAAUUACCU
UUGCACCAACCUGAUGGAGU
>hsa-mir-571 MI0003578
(SEQ ID NO: 1250)
CCUCAGUAAGACCAAGCUCAGUGUGCCAUUUCCUUGUCUGUAGCCAUGUCUAUGGGCUCUUGAGUUGGCCAUCUGAG
UGAGGGCCUGCUUAUUCUA
>hsa-mir-572 MI0003579
(SEQ ID NO: 1251)
GUCGAGGCCGUGGCCCGGAAGUGGUCGGGGCCGCUGCGGGCGGAAGGGCGCCUGUGCUUCGUCCGCUCGGCGGUGGC
CCAGCCAGGCCCGCGGGA
>hsa-mir-573 MI0003580
(SEQ ID NO: 1252)
UUUAGCGGUUUCUCCCUGAAGUGAUGUGUAACUGAUCAGGAUCUACUCAUGUCGUCUUUGGUAAAGUUAUGUCGCUU
GUCAGGGUGAGGAGAGUUUUUG
>hsa-mir-574 MI0003581
(SEQ ID NO: 1253)
GGGACCUGCGUGGGUGCGGGCGUGUGAGUGUGUGUGUGUGAGUGUGUGUCGCUCCGGGUCCACGCUCAUGCACACAC
CCACACGCCCACACUCAGG
>hsa-mir-575 MI0003582
(SEQ ID NO: 1254)
AAUUCAGCCCUGCCACUGGCUUAUGUCAUGACCUUGGGCUACUCAGGCUGUCUGCACAAUGAGCCAGUUGGACAGGA
GCAGUGCCACUCAACUC
>hsa-mir-576 MI0003583
(SEQ ID NO: 1255)
UACAAUCCAACGAGGAUUCUAAUUUCUCCACGUCUUUGGUAAUAAGGUUUGGCAAAGAUGUGGAAAAAUUGGAAUCC
UCAUUCGAUUGGUUAUAACCA
>hsa-mir-577 MI0003584
(SEQ ID NO: 1256)
UGGGGGAGUGAAGAGUAGAUAAAAUAUUGGUACCUGAUGAAUCUGAGGCCAGGUUUCAAUACUUUAUCUGCUCUUCA
UUUCCCCAUAUCUACUUAC
>hsa-mir-578 MI0003585
(SEQ ID NO: 1257)
AGAUAAAUCUAUAGACAAAAUACAAUCCCGGACAACAAGAAGCUCCUAUAGCUCCUGUAGCUUCUUGUGCUCUAGGA
UUGUAUUUUGUUUAUAUAU
>hsa-mir-579 MI0003586
(SEQ ID NO: 1258)
CAUAUUAGGUUAAUGCAAAAGUAAUCGCGGUUUGUGCCAGAUGACGAUUUGAAUUAAUAAAUUCAUUUGGUAUAAAC
CGCGAUUAUUUUUGCAUCAAC
>hsa-mir-580 MI0003587
(SEQ ID NO: 1259)
AUAAAAUUUCCAAUUGGAACCUAAUGAUUCAUCAGACUCAGAUAUUUAAGUUAACAGUAUUUGAGAAUGAUGAAUCA
UUAGGUUCCGGUCAGAAAUU
>hsa-mir-581 MI0003588
(SEQ ID NO: 1260)
GUUAUGUGAAGGUAUUCUUGUGUUCUCUAGAUCAGUGCUUUUAGAAAAUUUGUGUGAUCUAAAGAACACAAAGAAUA
CCUACACAGAACCACCUGC
>hsa-mir-582 MI0003589
(SEQ ID NO: 1261)
AUCUGUGCUCUUUGAUUACAGUUGUUCAACCAGUUACUAAUCUAACUAAUUGUAACUGGUUGAACAACUGAACCCAA
AGGGUGCAAAGUAGAAACAUU
>hsa-mir-583 MI0003590
(SEQ ID NO: 1262)
AACUCACACAUUAACCAAAGAGGAAGGUCCCAUUACUGCAGGGAUCUUAGCAGUACUGGGACCUACCUCUUUGGU
>hsa-mir-584 MI0003591
(SEQ ID NO: 1263)
UAGGGUGACCAGCCAUUAUGGUUUGCCUGGGACUGAGGAAUUUGCUGGGAUAUGUCAGUUCCAGGCCAACCAGGCUG
GUUGGUCUCCCUGAAGCAAC
>hsa-mir-585 MI0003592
(SEQ ID NO: 1264)
UGGGGUGUCUGUGCUAUGGCAGCCCUAGCACACAGAUACGCCCAGAGAAAGCCUGAACGUUGGGCGUAUCUGUAUGC
UAGGGCUGCUGUAACAA
>hsa-mir-586 MI0003594
(SEQ ID NO: 1265)
AUGGGGUAAAACCAUUAUGCAUUGUAUUUUUAGGUCCCAAUACAUGUGGGCCCUAAAAAUACAAUGCAUAAUGGUUU
UUCACUCUUUAUCUUCUUAU
>hsa-mir-587 MI0003595
(SEQ ID NO: 1266)
CUCCUAUGCACCCUCUUUCCAUAGGUGAUGAGUCACAGGGCUCAGGGAAUGUGUCUGCACCUGUGACUCAUCACCAG
UGGAAAGCCCAUCCCAUAU
>hsa-mir-588 MI0003597
(SEQ ID NO: 1267)
AGCUUAGGUACCAAUUUGGCCACAAUGGGUUAGAACACUAUUCCAUUGUGUUCUUACCCACCAUGGCCAAAAUUGGG
CCUAAG
>hsa-mir-589 MI0003599
(SEQ ID NO: 1268)
UCCAGCCUGUGCCCAGCAGCCCCUGAGAACCACGUCUGCUCUGAGCUGGGUACUGCCUGUUCAGAACAAAUGCCGGU
UCCCAGACGCUGCCAGCUGGCC
>hsa-mir-590 MI0003602
(SEQ ID NO: 1269)
UAGCCAGUCAGAAAUGAGCUUAUUCAUAAAAGUGCAGUAUGGUGAAGUCAAUCUGUAAUUUUAUGUAUAAGCUAGUC
UCUGAUUGAAACAUGCAGCA
>hsa-mir-591 MI0003603
(SEQ ID NO: 1270)
UCUUAUCAAUGAGGUAGACCAUGGGUUCUCAUUGUAAUAGUGUAGAAUGUUGGUUAACUGUGGACUCCCUGGCUCUG
UCUCAAAUCUACUGAUUC
>hsa-mir-592 MI0003604
(SEQ ID NO: 1271)
UAUUAUGCCAUGACAUUGUGUCAAUAUGCGAUGAUGUGUUGUGAUGGCACAGCGUCAUCACGUGGUGACGCAACAUC
AUGACGUAAGACGUCACAAC
>hsa-mir-593 MI0003605
(SEQ ID NO: 1272)
VCCCCCAGAAUCUGUCAGGCACCAGCCAGGCAUUGCUCAGCCCGUUUCCCUCUGGGGGAGCAAGGAGUGGUGCUGGGU
UUGUCUCUGCUGGGGUUUCUCCU
>hsa-mir-595 MI0003607
(SEQ ID NO: 1273)
ACGGAAGCCUGCACGCAUUUAACACCAGCACGCUCAAUGUAGUCUUGUAAGGAACAGGUUGAAGUGUGCCGUGGUGU
GUCUGGAGGAAGCGCCUGU
>hsa-mir-596 MI0003608
(SEQ ID NO: 1274)
AGCACGGCCUCUCCGAAGCCUGCCCGGCUCCUCGGGAACCUGCCUCCCGCAUGGCAGCUGCUGCCCUUCGGAGGCCG
>hsa-mir-597 MI0003609
(SEQ ID NO: 1275)
UACUUACUCUACGUGUGUGUCACUCGAUGACCACUGUGAAGACAGUAAAAUGUACAGUGGUUCUCUUGUGGCUCAAG
CGUAAUGUAGAGUACUGGUC
>hsa-mir-598 MI0003610
(SEQ ID NO: 1276)
GCUUGAUGAUGCUGCUGAUGCUGGCGGUGAUCCCGAUGGUGUGAGCUGGAAAUGGGGUGCUACGUCAUCGUUGUCAU
CGUCAUCAUCAUCAUCCGAG
>hsa-mir-599 MI0003611
(SEQ ID NO: 1277)
AAAGACAUGCUGUCCACAGUGUGUUUGAUAAGCUGACAUGGGACAGGGAUUCUUUUCACUGUUGUGUCAGUUUAUCA
AACCCAUACUUGGAUGAC
>hsa-mir-600 MI0003613
(SEQ ID NO: 1278)
AAGUCACGUGCUGUGGCUCCAGCUUCAUAGGAAGGCUCUUGUCUGUCAGGCAGUGGAGUUACUUACAGACAAGAGCC
UUGCUCAGGCCAGCCCUGCCC
>hsa-mir-601 MI0003614
(SEQ ID NO: 1279)
UGCAUGAGUUCGUCUUGGUCUAGGAUUGUUGGAGGAGUCAGAAAAACUACCCCAGGGAUCCUGAAGUCCUUUGGGUG
GA
>hsa-mir-602 MI0003615
(SEQ ID NO: 1280)
UUCUCACCCCCGCCUGACACGGGCGACAGCUGCGGCCCGCUGUGUUCACUCGGGCCGAGUGCGUCUCCUGUCAGGCA
AGGGAGAGCAGAGCCCCCCUG
>hsa-mir-603 MI0003616
(SEQ ID NO: 1281)
GAUUGAUGCUGUUGGUUUGGUGCAAAAGUAAUUGCAGUGCUUCCCAUUUAAAAGUAAUGGCACACACUGCAAUUACU
UUUGCUCCAACUUAAUACUU
>hsa-mir-604 MI0003617
(SEQ ID NO: 1282)
AGAGCAUCGUGCUUGACCUUCCACGCUCUCGUGUCCACUAGCAGGCAGGUUUUCUGACACAGGCUGCGGAAUUCAGG
ACAGUGCAUCAUGGAGA
>hsa-mir-605 MI0003618
(SEQ ID NO: 1283)
GCCCUAGCUUGGUUCUAAAUCCCAUGGUGCCUUCUCCUUGGGAAAAACAGAGAAGGCACUAUGAGAUUUAGAAUCAA
GUUAGG
>hsa-mir-606 MI0003619
(SEQ ID NO: 1284)
UGUAUCCUUGGUUUUUAGUAGUUUUACUAUGAUGAGGUGUGCCAUCCACCCCAUCAUAGUAAACUACUGAAAAUCAA
AGAUACAAGUGCCUGACCA
>hsa-mir-607 MI0003620
(SEQ ID NO: 1285)
UUGCCUAAAGUCACACAGGUUAUAGAUCUGGAUUGGAACCCAGGGAGCCAGACUGCCUGGGUUCAAAUCCAGAUCUA
UAACUUGUGUGACUUUGGG
>hsa-mir-608 MI0003621
(SEQ ID NO: 1286)
GGGCCAAGGUGGGCCAGGGGUGGUGUUGGGACAGCUCCGUUUAAAAAGGCAUCUCCAAGAGCUUCCAUCAAAGGCUG
CCUCUUGGUGCAGCACAGGUAGA
>hsa-mir-609 MI0003622
(SEQ ID NO: 1287)
UGCUCGGCUGUUCCUAGGGUGUUUCUCUCAUCUCUGGUCUAUAAUGGGUUAAAUAGUAGAGAUGAGGGCAACACCCU
AGGAACAGCAGAGGAACC
>hsa-mir-610 MI0003623
(SEQ ID NO: 1288)
UCUAUUUGUCUUAGGUGAGCUAAAUGUGUGCUGGGACACAUUUGAGCCAAAUGUCCCAGCACACAUUUAGCUCACAU
AAGAAAAAUGGACUCUAGU
>hsa-mir-611 MI0003624
(SEQ ID NO: 1289)
AAAAUGGUGAGAGCGUUGAGGGGAGUUCCAGACGGAGAUGCGAGGACCCCUCGGGGUCUGACCCACA
>hsa-mir-612 MI0003625
(SEQ ID NO: 1290)
UCCCAUCUGGACCCUGCUGGGCAGGGCUUCUGAGCUCCUUAGCACUAGCAGGAGGGGCUCCAGGGGCCCUCCCUCCA
UGGCAGCCAGGACAGGACUCUCA
>hsa-mir-613 MI0003626
(SEQ ID NO: 1291)
GGUGAGUGCGUUUCCAAGUGUGAAGGGACCCUUCCUGUAGUGUCUUAUAUACAAUACAGUAGGAAUGUUCCUUCUUU
GCCACUCAUACACCUUUA
>hsa-mir-614 MI0003627
(SEQ ID NO: 1292)
UCUAAGAAACGCAGUGGUCUCUGAAGCCUGCAGGGGCAGGCCAGCCCUGCACUGAACGCCUGUUCUUGCCAGGUGGC
AGAAGGUUGCUGC
>hsa-mir-615 MI0003628
(SEQ ID NO: 1293)
CUCGGGAGGGGCGGGAGGGGGGUCCCCGGUGCUCGGAUCUCGAGGGUGCUUAUUGUUCGGUCCGAGCCUGGGUCUCC
CUCUUCCCCCCAACCCCCC
>hsa-mir-616 MI0003629
(SEQ ID NO: 1294)
UUAGGUAAUUCCUCCACUCAAAACCCUUCAGUGACUUCCAUGACAUGAAAUAGGAAGUCAUUGGAGGGUUUGAGCAG
AGGAAUGACCUGUUUUAAAA
>hsa-mir-617 MI0003631
(SEQ ID NO: 1295)
CAUCAUAAGGAGCCUAGACUUCCCAUUUGAAGGUGGCCAUUUCCUACCACCUUCAAAUGGUAAGUCCAGGCUCCUUC
UGAUUCAAUAAAUGAGGAGC
>hsa-mir-618 MI0003632
(SEQ ID NO: 1296)
CUCUUGUUCACAGCCAAACUCUACUUGUCCUUCUGAGUGUAAUUACGUACAUGCAGUAGCUCAGGAGACAAGCAGGU
UUACCCUGUGGAUGAGUCUGA
>hsa-mir-619 MI0003633
(SEQ ID NO: 1297)
CGCCCACCUCAGCCUCCCAAAAUGCUGGGAUUACAGGCAUGAGCCACUGCGGUCGACCAUGACCUGGACAUGUUUGU
GCCCAGUACUGUCAGUUUGCAG
>hsa-mir-620 MI0003634
(SEQ ID NO: 1298)
AUAUAUAUCUAUAUCUAGCUCCGUAUAUAUAUAUAUAUAUAUAUAGAUAUCUCCAUAUAUAUGGAGAUAGAUAUAGA
AAUAAAACAAGCAAAGAA
>hsa-mir-621 MI0003635
(SEQ ID NO: 1299)
UAGAUUGAGGAAGGGGCUGAGUGGUAGGCGGUGCUGCUGUGCUCUGAUGAAGACCCAUGUGGCUAGCAACAGCGCUU
ACCUUUUGUCUCUGGGUCC
>hsa-mir-622 MI0003636
(SEQ ID NO: 1300)
AGAGAAGCUGGACAAGUACUGGUCUCAGCAGAUUGAGGAGAGCACCACAGUGGUCAUCACACAGUCUGCUGAGGUUG
GAGCUGCUGAGAUGACACU
>hsa-mir-623 MI0003637
(SEQ ID NO: 1301)
GUACACAGUAGAAGCAUCCCUUGCAGGGGCUGUUGGGUUGCAUCCUAAGCUGUGCUGGAGCUUCCCGAUGUACUCUG
UAGAUGUCUUUGCACCUUCUG
>hsa-mir-624 MI0003638
(SEQ ID NO: 1302)
AAUGCUGUUUCAAGGUAGUACCAGUACCUUGUGUUCAGUGGAACCAAGGUAAACACAAGGUAUUGGUAUUACCUUGA
GAUAGCAUUACACCUAAGUG
>hsa-mir-625 MI0003639
(SEQ ID NO: 1303)
AGGGUAGAGGGAUGAGGGGGAAAGUUCUAUAGUCCUGUAAUUAGAUCUCAGGACUAUAGAACUUUCCCCCUCAUCCC
UCUGCCCU
>hsa-mir-626 MI0003640
(SEQ ID NO: 1304)
ACUGAUAUAUUUGUCUUAUUUGAGAGCUGAGGAGUAUUUUUAUGCAAUCUGAAUGAUCUCAGCUGUCUGAAAAUGUC
UUCAAUUUUAAAGGCUU
>hsa-mir-627 MI0003641
(SEQ ID NO: 1305)
UACUUAUUACUGGUAGUGAGUCUCUAAGAAAAGAGGAGGUGGUUGUUUUCCUCCUCUUUUCUUUGAGACUCACUACC
AAUAAUAAGAAAUACUACUA
>hsa-mir-628 MI0003642
(SEQ ID NO: 1306)
AUAGCUGUUGUGUCACUUCCUCAUGCUGACAUAUUUACUAGAGGGUAAAAUUAAUAACCUUCUAGUAAGAGUGGCAG
UCGAAGGGAAGGGCUCAU
>hsa-mir-629 MI0003643
(SEQ ID NO: 1307)
UCCCUUUCCCAGGGGAGGGGCUGGGUUUACGUUGGGAGAACUUUUACGGUGAACCAGGAGGUUCUCCCAACGUAAGC
CCAGCCCCUCCCCUCUGCCU
>hsa-mir-630 MI0003644
(SEQ ID NO: 1308)
AACUUAACAUCAUGCUACCUCUUUGUAUCAUAUUUUGUUAUUCUGGUCACAGAAUGACCUAGUAUUCUGUACCAGGG
AAGGUAGUUCUUAACUAUAU
>hsa-mir-631 MI0003645
(SEQ ID NO: 1309)
GUGGGGAGCCUGGUUAGACCUGGCCCAGACCUCAGCUACACAAGCUGAUGGACUGAGUCAGGGGCCACACUCUCC
>hsa-mir-632 MI0003647
(SEQ ID NO: 1310)
CGCCUCCUACCGCAGUGCUUGACGGGAGGCGGAGCGGGGAACGAGGCCGUCGGCCAUUUUGUGUCUGCUUCCUGUGG
GACGUGGUGGUAGCCGU
>hsa-mir-633 MI0003648
(SEQ ID NO: 1311)
AACCUCUCUUAGCCUCUGUUUCUUUAUUGCGGUAGAUACUAUUAACCUAAAAUGAGAAGGCUAAUAGUAUCUACCAC
AAUAAAAUUGUUGUGAGGAUA
>hsa-mir-634 MI0003649
(SEQ ID NO: 1312)
AAACCCACACCACUGCAUUUUGGCCAUCGAGGGUUGGGGCUUGGUGUCAUGCCCCAAGAUAACCAGCACCCCAACUU
UGGACAGCAUGGAUUAGUCU
>hsa-mir-635 MI0003650
(SEQ ID NO: 1313)
CAGAGAGGAGCUGCCACUUGGGCACUGAAACAAUGUCCAUUAGGCUUUGUUAUGGAAACUUCUCCUGAUCAUUGUUU
UGUGUCCAUUGAGCUUCCAAU
>hsa-mir-636 MI0003651
(SEQ ID NO: 1314)
UGGCGGCCUGGGCGGGAGCGCGCGGGCGGGGCCGGCCCCGCUGCCUGGAAUUAACCCCGCUGUGCUUGCUCGUCCCG
CCCGCAGCCCUAGGCGGCGUCG
>hsa-mir-637 MI0003652
(SEQ ID NO: 1315)
UGGCUAAGGUGUUGGCUCGGGCUCCCCACUGCAGUUACCCUCCCCUCGGCGUUACUGAGCACUGGGGGCUUUCGGGC
UCUGCGUCUGCACAGAUACUUC
>hsa-mir-638 MI0003653
(SEQ ID NO: 1316)
GUGAGCGGGCGCGGCAGGGAUCGCGGGCGGGUGGCGGCCUAGGGCGCGGAGGGCGGACCGGGAAUGGCGCGCCGUGC
GCCGCCGGCGUAACUGCGGCGCU
>hsa-mir-639 MI0003654
(SEQ ID NO: 1317)
UGGCCGACGGGGCGCGCGCGGCCUGGAGGGGCGGGGCGGACGCAGAGCCGCGUUUAGUCUAUCGCUGCGGUUGCGAG
CGCUGUAGGGAGCCUGUGCUG
>hsa-mir-640 MI0003655
(SEQ ID NO: 1318)
GUGACCCUGGGCAAGUUCCUGAAGAUCAGACACAUCAGAUCCCUUAUCUGUAAAAUGGGCAUGAUCCAGGAACCUGC
CUCUACGGUUGCCUUGGGG
>hsa-mir-641 MI0003656
(SEQ ID NO: 1319)
UGGGUGAAAGGAAGGAAAGACAUAGGAUAGAGUCACCUCUGUCCUCUGUCCUCUACCUAUAGAGGUGACUGUCCUAU
GUCUUUCCUUCCUCUUACCCCU
>hsa-mir-642a MI0003657
(SEQ ID NO: 1320)
AUCUGAGUUGGGAGGGUCCCUCUCCAAAUGUGUCUUGGGGUGGGGGAUCAAGACACAUUUGGAGAGGGAACCUCCCA
ACUCGGCCUCUGCCAUCAUU
>hsa-mir-642b MI0016685
(SEQ ID NO: 1321)
GAGUUGGGAGGUUCCCUCUCCAAAUGUGUCUUGAUCCCCCACCCCAAGACACAUUUGGAGAGGGACCCUCCCAACUC
>hsa-mir-643 MI0003658
(SEQ ID NO: 1322)
ACCAAGUGAUAUUCAUUGUCUACCUGAGCUAGAAUACAAGUAGUUGGCGUCUUCAGAGACACUUGUAUGCUAGCUCA
GGUAGAUAUUGAAUGAAAAA
>hsa-mir-644a MI0003659
(SEQ ID NO: 1323)
UUUUUUUUUAGUAUUUUUCCAUCAGUGUUCAUAAGGAAUGUUGCUCUGUAGUUUUCUUAUAGUGUGGCUUUCUUAGA
GCAAAGAUGGUUCCCUA
>hsa-mir-644b MI0019134
(SEQ ID NO: 1324)
UGGGCUAAGGGAGAUGAUUGGGUAGAAAGUAUUAUUCUAUUCAUUUGCCUCCCAGCCUACA
>hsa-mir-645 MI0003660
(SEQ ID NO: 1325)
CAGUUCCUAACAGGCCUCAGACCAGUACCGGUCUGUGGCCUGGGGGUUGAGGACCCCUGCUCUAGGCUGGUACUGCU
GAUGCUUAAAAAGAGAG
>hsa-mir-646 MI0003661
(SEQ ID NO: 1326)
GAUCAGGAGUCUGCCAGUGGAGUCAGCACACCUGCUUUUCACCUGUGAUCCCAGGAGAGGAAGCAGCUGCCUCUGAG
GCCUCAGGCUCAGUGGC
>hsa-mir-647 MI0003662
(SEQ ID NO: 1327)
AGGAAGUGUUGGCCUGUGGCUGCACUCACUUCCUUCAGCCCCAGGAAGCCUUGGUCGGGGGCAGGAGGGAGGGUCAG
GCAGGGCUGGGGGCCUGAC
>hsa-mir-648 MI0003663
(SEQ ID NO: 1328)
AUCACAGACACCUCCAAGUGUGCAGGGCACUGGUGGGGGCCGGGGCAGGCCCAGCGAAAGUGCAGGACCUGGCACUU
AGUCGGAAGUGAGGGUG
>hsa-mir-649 MI0003664
(SEQ ID NO: 1329)
GGCCUAGCCAAAUACUGUAUUUUUGAUCGACAUUUGGUUGAAAAAUAUCUAUGUAUUAGUAAACCUGUGUUGUUCAA
GAGUCCACUGUGUUUUGCUG
>hsa-mir-650 MI0003665
(SEQ ID NO: 1330)
CAGUGCUGGGGUCUCAGGAGGCAGCGCUCUCAGGACGUCACCACCAUGGCCUGGGCUCUGCUCCUCCUCACCCUCCU
CACUCAGGGCACAGGUGAU
>hsa-mir-651 MI0003666
(SEQ ID NO: 1331)
AAUCUAUCACUGCUUUUUAGGAUAAGCUUGACUUUUGUUCAAAUAAAAAUGCAAAAGGAAAGUGUAUCCUAAAAGGC
AAUGACAGUUUAAUGUGUUU
>hsa-mir-652 MI0003667
(SEQ ID NO: 1332)
ACGAAUGGCUAUGCACUGCACAACCCUAGGAGAGGGUGCCAUUCACAUAGACUAUAAUUGAAUGGCGCCACUAGGGU
UGUGCAGUGCACAACCUACAC
>hsa-mir-653 MI0003674
(SEQ ID NO: 1333)
UUCAUUCCUUCAGUGUUGAAACAAUCUCUACUGAACCAGCUUCAAACAAGUUCACUGGAGUUUGUUUCAAUAUUGCA
AGAAUGAUAAGAUGGAAGC
>hsa-mir-654 MI0003676
(SEQ ID NO: 1334)
GGGUAAGUGGAAAGAUGGUGGGCCGCAGAACAUGUGCUGAGUUCGUGCCAUAUGUCUGCUGACCAUCACCUUUAGAA
GCCC
>hsa-mir-655 MI0003677
(SEQ ID NO: 1335)
AACUAUGCAAGGAUAUUUGAGGAGAGGUUAUCCGUGUUAUGUUCGCUUCAUUCAUCAUGAAUAAUACAUGGUUAACC
UCUUUUUGAAUAUCAGACUC
>hsa-mir-656 MI0003678
(SEQ ID NO: 1336)
CUGAAAUAGGUUGCCUGUGAGGUGUUCACUUUCUAUAUGAUGAAUAUUAUACAGUCAACCUCUUUCCGAUAUCGAAUC
>hsa-mir-657 MI0003681
(SEQ ID NO: 1337)
GUGUAGUAGAGCUAGGAGGAGAGGGUCCUGGAGAAGCGUGGACCGGUCCGGGUGGGUUCCGGCAGGUUCUCACCCUC
UCUAGGCCCCAUUCUCCUCUG
>hsa-mir-658 MI0003682
(SEQ ID NO: 1338)
GCUCGGUUGCCGUGGUUGCGGGCCCUGCCCGCCCGCCAGCUCGCUGACAGCACGACUCAGGGCGGAGGGAAGUAGGU
CCGUUGGUCGGUCGGGAACGAGG
>hsa-mir-659 MI0003683
(SEQ ID NO: 1339)
UACCGACCCUCGAUUUGGUUCAGGACCUUCCCUGAACCAAGGAAGAGUCACAGUCUCUUCCUUGGUUCAGGGAGGGU
CCCCAACAAUGUCCUCAUGG
>hsa-mir-660 MI0003684
(SEQ ID NO: 1340)
CUGCUCCUUCUCCCAUACCCAUUGCAUAUCGGAGUUGUGAAUUCUCAAAACACCUCCUGUGUGCAUGGAUUACAGGA
GGGUGAGCCUUGUCAUCGUG
>hsa-mir-661 MI0003669
(SEQ ID NO: 1341)
GGAGAGGCUGUGCUGUGGGGCAGGCGCAGGCCUGAGCCCUGGUUUCGGGCUGCCUGGGUCUCUGGCCUGCGCGUGAC
UUUGGGGUGGCU
>hsa-mir-662 MI0003670
(SEQ ID NO: 1342)
GCUGUUGAGGCUGCGCAGCCAGGCCCUGACGGUGGGGUGGCUGCGGGCCUUCUGAAGGUCUCCCACGUUGUGGCCCA
GCAGCGCAGUCACGUUGC
>hsa-mir-663a MI0003672
(SEQ ID NO: 1343)
CCUUCCGGCGUCCCAGGCGGGGCGCCGCGGGACCGCCCUCGUGUCUGUGGCGGUGGGAUCCCGCGGCCGUGUUUUCC
UGGUGGCCCGGCCAUG
>hsa-mir-663b MI0006336
(SEQ ID NO: 1344)
GGUGCCGAGGGCCGUCCGGCAUCCUAGGCGGGUCGCUGCGGUACCUCCCUCCUGUCUGUGGCGGUGGGAUCCCGUGG
CCGUGUUUUCCUGGUGGCCCGGCCGUGCCUGAGGUUUC
>hsa-mir-664 MI0006442
(SEQ ID NO: 1345)
GAACAUUGAAACUGGCUAGGGAAAAUGAUUGGAUAGAAACUAUUAUUCUAUUCAUUUAUCCCCAGCCUACAAAAUGA
AAAAA
>hsa-mir-665 MI0005563
(SEQ ID NO: 1346)
UCUCCUCGAGGGGUCUCUGCCUCUACCCAGGACUCUUUCAUGACCAGGAGGCUGAGGCCCCUCACAGGCGGC
>hsa-mir-668 MI0003761
(SEQ ID NO: 1347)
GGUAAGUGCGCCUCGGGUGAGCAUGCACUUAAUGUGGGUGUAUGUCACUCGGCUCGGCCCACUACC
>hsa-mir-670 MI0003933
(SEQ ID NO: 1348)
GUUUAGGGGUGGACCUGAUGUCCCUGAGUGUAUGUGGUGAACCUGAAUUUGCCUUGGGUUUCCUCAUAUUCAUUCAG
GAGUGUCAGUUGCCCCUUCAC
>hsa-mir-671 MI0003760
(SEQ ID NO: 1349)
GCAGGUGAACUGGCAGGCCAGGAAGAGGAGGAAGCCCUGGAGGGGCUGGAGGUGAUGGAUGUUUUCCUCCGGUUCUC
AGGGCUCCACCUCUUUCGGGCCGUAGAGCCAGGGCUGGUGC
>hsa-mir-675 MI0005416
(SEQ ID NO: 1350)
CCCAGGGUCUGGUGCGGAGAGGGCCCACAGUGGACUUGGUGACGCUGUAUGCCCUCACCGCUCAGCCCCUGGG
>hsa-mir-676 MI0016436
(SEQ ID NO: 1351)
GCAUGACUCUUCAACCUCAGGACUUGCAGAAUUAAUGGAAUGCUGUCCUAAGGUUGUUGAGUUGUGC
>hsa-mir-708 MI0005543
(SEQ ID NO: 1352)
AACUGCCCUCAAGGAGCUUACAAUCUAGCUGGGGGUAAAUGACUUGCACAUGAACACAACUAGACUGUGAGCUUCUA
GAGGGCAGGGA
>hsa-mir-711 MI0012488
(SEQ ID NO: 1353)
ACUGACUUUGAGUCUCUCCUCAGGGUGCUGCAGGCAAAGCUGGGGACCCAGGGAGAGACGUAAGUGAGGGGAGAUG
>hsa-mir-718 MI0012489
(SEQ ID NO: 1354)
GGCCGCGGCGCGCAAGAUGGCGGCGGGCCCGGGCACCGCCCCUUCCGCCCCGCCGGGCGUCGCACGAGGC
>hsa-mir-720 MI0006654
(SEQ ID NO: 1355)
CCGGAUCUCACACGGUGGUGUUAAUAUCUCGCUGGGGCCUCCAAAAUGUUGUGCCCAGGGGUGUUAGAGAAAACACC
ACACUUUGAGAUGAAUUAAGAGUCCUUUAUUAG
>hsa-mir-744 MI0005559
(SEQ ID NO: 1356)
UUGGGCAAGGUGCGGGGCUAGGGCUAACAGCAGUCUUACUGAAGGUUUCCUGGAAACCACGCACAUGCUGUUGCCAC
UAACCUCAACCUUACUCGGUC
>hsa-mir-758 MI0003757
(SEQ ID NO: 1357)
GCCUGGAUACAUGAGAUGGUUGACCAGAGAGCACACGCUUUAUUUGUGCCGUUUGUGACCUGGUCCACUAACCCUCA
GUAUCUAAUGC
>hsa-mir-759 MI0004065
(SEQ ID NO: 1358)
UAAUAAAUUAAAUGCCUAAACUGGCAGAGUGCAAACAAUUUUGACUCAGAUCUAAAUGUUUGCACUGGCUGUUUAAA
CAUUUAAUUUGUUA
>hsa-mir-760 MI0005567
(SEQ ID NO: 1359)
GGCGCGUCGCCCCCCUCAGUCCACCAGAGCCCGGAUACCUCAGAAAUUCGGCUCUGGGUCUGUGGGGAGCGAAAUGC
AAC
>hsa-mir-761 MI0003941
(SEQ ID NO: 1360)
GGAGGAGCAGCAGGGUGAAACUGACACAGUUCUGGUGAGUUUCACUUUGCUGCUCCUCC
>hsa-mir-762 MI0003892
(SEQ ID NO: 1361)
GGCCCGGCUCCGGGUCUCGGCCCGUACAGUCCGGCCGGCCAUGCUGGCGGGGCUGGGGCCGGGGCCGAGCCCGCGGC
GGGGCC
>hsa-mir-764 MI0003944
(SEQ ID NO: 1362)
AAUCUAGGAGGCAGGUGCUCACUUGUCCUCCUCCAUGCUUGGAAAAUGCAGGGAGGAGGCCAUAGUGGCAACUGUUA
CCAUGAUU
>hsa-mir-765 MI0005116
(SEQ ID NO: 1363)
UUUAGGCGCUGAUGAAAGUGGAGUUCAGUAGACAGCCCUUUUCAAGCCCUACGAGAAACUGGGGUUUCUGGAGGAGA
AGGAAGGUGAUGAAGGAUCUGUUCUCGUGAGCCUGAA
>hsa-mir-766 MI0003836
(SEQ ID NO: 1364)
GCAUCCUCAGGACCUGGGCUUGGGUGGUAGGAGGAAUUGGUGCUGGUCUUUCAUUUUGGAUUUGACUCCAGCCCCAC
AGCCUCAGCCACCCCAGCCAAUUGUCAUAGGAGC
>hsa-mir-767 MI0003763
(SEQ ID NO: 1365)
GCUUUUAUAUUGUAGGUUUUUGCUCAUGCACCAUGGUUGUCUGAGCAUGCAGCAUGCUUGUCUGCUCAUACCCCAUG
GUUUCUGAGCAGGAACCUUCAUUGUCUACUGC
>hsa-mir-769 MI0003834
(SEQ ID NO: 1366)
GCCUUGGUGCUGAUUCCUGGGCUCUGACCUGAGACCUCUGGGUUCUGAGCUGUGAUGUUGCUCUCGAGCUGGGAUCU
CCGGGGUCUUGGUUCAGGGCCGGGGCCUCUGGGUUCCAAGC
>hsa-mir-770 MI0005118
(SEQ ID NO: 1367)
AGGAGCCACCUUCCGAGCCUCCAGUACCACGUGUCAGGGCCACAUGAGCUGGGCCUCGUGGGCCUGAUGUGGUGCUG
GGGCCUCAGGGGUCUGCUCUU
>hsa-mir-802 MI0003906
(SEQ ID NO: 1368)
GUUCUGUUAUUUGCAGUCAGUAACAAAGAUUCAUCCUUGUGUCCAUCAUGCAACAAGGAGAAUCUUUGUCACUUAGU
GUAAUUAAUAGCUGGAC
>hsa-mir-873 MI0005564
(SEQ ID NO: 1369)
GUGUGCAUUUGCAGGAACUUGUGAGUCUCCUAUUGAAAAUGAACAGGAGACUGAUGAGUUCCCGGGAACACCCACAA
>hsa-mir-874 MI0005532
(SEQ ID NO: 1370)
UUAGCCCUGCGGCCCCACGCACCAGGGUAAGAGAGACUCUCGCUUCCUGCCCUGGCCCGAGGGACCGACUGGCUGGGC
>hsa-mir-875 MI0005541
(SEQ ID NO: 1371)
UUAGUGGUACUAUACCUCAGUUUUAUCAGGUGUUCUUAAAAUCACCUGGAAACACUGAGGUUGUGUCUCACUGAAC
>hsa-mir-876 MI0005542
(SEQ ID NO: 1372)
UGAAGUGCUGUGGAUUUCUUUGUGAAUCACCAUAUCUAAGCUAAUGUGGUGGUGGUUUACAAAGUAAUUCAUAGUGC
UUCA
>hsa-mir-877 MI0005561
(SEQ ID NO: 1373)
GUAGAGGAGAUGGCGCAGGGGACACGGGCAAAGACUUGGGGGUUCCUGGGACCCUCAGACGUGUGUCCUCUUCUCCC
UCCUCCCAG
>hsa-mir-885 MI0005560
(SEQ ID NO: 1374)
CCGCACUCUCUCCAUUACACUACCCUGCCUCUUCUCCAUGAGAGGCAGCGGGGUGUAGUGGAUAGAGCACGGGU
>hsa-mir-887 MI0005562
(SEQ ID NO: 1375)
GUGCAGAUCCUUGGGAGCCCUGUUAGACUCUGGAUUUUACACUUGGAGUGAACGGGCGCCAUCCCGAGGCUUUGCAC
AG
>hsa-mir-888 MI0005537
(SEQ ID NO: 1376)
GGCAGUGCUCUACUCAAAAAGCUGUCAGUCACUUAGAUUACAUGUGACUGACACCUCUUUGGGUGAAGGAAGGCUCA
>hsa-mir-889 MI0005540
(SEQ ID NO: 1377)
GUGCUUAAAGAAUGGCUGUCCGUAGUAUGGUCUCUAUAUUUAUGAUGAUUAAUAUCGGACAACCAUUGUUUUAGUAU
CC
>hsa-mir-890 MI0005533
(SEQ ID NO: 1378)
GGAAGUGCCCUACUUGGAAAGGCAUCAGUUGCUUAGAUUACAUGUAACUAUUCCCUUUCUGAGUAGAGUAAGUCUUA
>hsa-mir-891a MI0005524
(SEQ ID NO: 1379)
CCUUAAUCCUUGCAACGAACCUGAGCCACUGAUUCAGUAAAAUACUCAGUGGCACAUGUUUGUUGUGAGGGUCAAAA
GA
>hsa-mir-891b MI0005534
(SEQ ID NO: 1380)
CCUUAAUCCUUGCAACUUACCUGAGUCAUUGAUUCAGUAAAACAUUCAAUGGCACAUGUUUGUUGUUAGGGUCAAAA
GA
>hsa-mir-892a MI0005528
(SEQ ID NO: 1381)
GCAGUGCCUUACUCAGAAAGGUGCCAGUCACUUACACUACAUGUCACUGUGUCCUUUCUGCGUAGAGUAAGGCUC
>hsa-mir-892b MI0005538
(SEQ ID NO: 1382)
UGCAAUGCCCUACUCAGAAAGGUGCCAUUUAUGUAGAUUUUAUGUCACUGGCUCCUUUCUGGGUAGAGCAAGGCUCA
>hsa-mir-920 MI0005712
(SEQ ID NO: 1383)
GUAGUUGUUCUACAGAAGACCUGGAUGUGUAGGAGCUAAGACACACUCCAGGGGAGCUGUGGAAGCAGUAACACG
>hsa-mir-921 MI0005713
(SEQ ID NO: 1384)
ACUAGUGAGGGACAGAACCAGGAUUCAGACUCAGGUCCAUGGGCCUGGAUCACUGG
>hsa-mir-922 MI0005714
(SEQ ID NO: 1385)
AUGGCGUUUUCCCUCUCCCUGUCCUGGACUGGGGUCAGACUGUGCCCCGAGGAGAAGCAGCAGAGAAUAGGACUACG
UCAU
>hsa-mir-924 MI0005716
(SEQ ID NO: 1386)
AAUAGAGUCUUGUGAUGUCUUGCUUAAGGGCCAUCCAACCUAGAGUCUACAAC
>hsa-mir-933 MI0005755
(SEQ ID NO: 1387)
ACUUGGGUCAGUUCAGAGGUCCUCGGGGCGCGCGUCGAGUCAGCCGUGUGCGCAGGGAGACCUCUCCCACCCACAGU
>hsa-mir-934 MI0005756
(SEQ ID NO: 1388)
AGAAAUAAGGCUUCUGUCUACUACUGGAGACACUGGUAGUAUAAAACCCAGAGUCUCCAGUAAUGGACGGGAGCCUU
AUUUCU
>hsa-mir-935 MI0005757
(SEQ ID NO: 1389)
GGCGGGGGCGCGGGCGGCAGUGGCGGGAGCGGCCCCUCGGCCAUCCUCCGUCUGCCCAGUUACCGCUUCCGCUACCG
CCGCCGCUCCCGCU
>hsa-mir-936 MI0005758
(SEQ ID NO: 1390)
UCAAGGCCACUGGGACAGUAGAGGGAGGAAUCGCAGAAAUCACUCCAGGAGCAACUGAGAGACCUUGCUUCUACUUU
ACCAGGUCCUGCUGGCCCAGA
>hsa-mir-937 MI0005759
(SEQ ID NO: 1391)
AGCACUGCCCCCGGUGAGUCAGGGUGGGGCUGGCCCCCUGCUUCGUGCCCAUCCGCGCUCUGACUCUCUGCCCACCU
GCAGGAGCU
>hsa-mir-938 MI0005760
(SEQ ID NO: 1392)
GAAGGUGUACCAUGUGCCCUUAAAGGUGAACCCAGUGCACCUUCAUGAACCGUGGUACACCUUUAAGAACUUGGUAU
GCCUUC
>hsa-mir-939 MI0005761
(SEQ ID NO: 1393)
UGUGGGCAGGGCCCUGGGGAGCUGAGGCUCUGGGGGUGGCCGGGGCUGACCCUGGGCCUCUGCUCCCCAGUGUCUGA
CCGCG
>hsa-mir-940 MI0005762
(SEQ ID NO: 1394)
GUGAGGUGUGGGCCCGGCCCCAGGAGCGGGGCCUGGGCAGCCCCGUGUGUUGAGGAAGGAAGGCAGGGCCCCCGCUC
CCCGGGCCUGACCCCAC
>hsa-mir-941-1 MI0005763
(SEQ ID NO: 1395)
CACGGAAGAGGACACACCCGGCUGUGUGGACAUGUGCCCAGGGCCCGGGACAGCGCCACGGAAGAGGACGCACCCGG
CUGUGUGCACAUGUGCCCAGGGCCCGGGACAGCGCCACGG
>hsa-mir-941-2 MI0005764
(SEQ ID NO: 1396)
CACGGAAGAGGACGCACCCGGCUGUGUGCACAUGUGCCCAGGGCCCGGGACAGCGCCACGGAAGAGGACGCACCCGG
CUGUGUGCACAUGUGCCCAGGGCCCGGGACAGCGCCACGG
>hsa-mir-941-3 MI0005765
(SEQ ID NO: 1397)
CACGGAAGAGGACGCACCCGGCUGUGUGCACAUGUGCCCAGGGCCCGGGACAGCGCCACGGAAGAGGACGCACCCGG
CUGUGUGCACAUGUGCCCAGGGCCCGGGACAGCGCCAUGG
>hsa-mir-941-4 MI0005766
(SEQ ID NO: 1398)
CAUGGAAGAGGACGCACCCGGCUGUGUGCACAUGUGCCCAGGGCCCGGGACAGCGCCACGGAAGAGGACGCACCCGG
CUGUGUGCACAUGUGCCCAGGGCCCGGGACAGCGCCACGG
>hsa-mir-942 MI0005767
(SEQ ID NO: 1399)
AUUAGGAGAGUAUCUUCUCUGUUUUGGCCAUGUGUGUACUCACAGCCCCUCACACAUGGCCGAAACAGAGAAGUUAC
UUUCCUAAU
>hsa-mir-943 MI0005768
(SEQ ID NO: 1400)
GGGACGUUCUGAGCUCGGGGUGGGGGACGUUUGCCGGUCACUGCUGCUGGCGCCCUGACUGUUGCCGUCCUCCAGCC
CCACUCAAAGGCAUCCC
>hsa-mir-944 MI0005769
(SEQ ID NO: 1401)
GUUCCAGACACAUCUCAUCUGAUAUACAAUAUUUUCUUAAAUUGUAUAAAGAGAAAUUAUUGUACAUCGGAUGAGCU
GUGUCUGGGAU
>hsa-mir-1178 MI0006271
(SEQ ID NO: 1402)
GCGUUGGCUGGCAGAGGAAGGGAAGGGUCCAGGGUCAGCUGAGCAUGCCCUCAGGUUGCUCACUGUUCUUCCCUAGA
AUGUCAGGUGAUGU
>hsa-mir-1179 MI0006272
(SEQ ID NO: 1403)
GGCUGGAAAGGAAGAAGCAUUCUUUCAUUGGUUGGUGUGUAUUGCCUUGUCAACCAAUAAGAGGAUGCCAUUUAUCC
UUUUCUGACUAGCU
>hsa-mir-1180 MI0006273
(SEQ ID NO: 1404)
GCUGCUGGACCCACCCGGCCGGGAAUAGUGCUCCUGGUUGUUUCCGGCUCGCGUGGGUGUGUCGGCGGC
>hsa-mir-1181 MI0006274
(SEQ ID NO: 1405)
UCCACUGCUGCCGCCGUCGCCGCCACCCGAGCCGGAGCGGGCUGGGCCGCCAAGGCAAGAUGGUGGACUACAGCGUG
UGGG
>hsa-mir-1182 MI0006275
(SEQ ID NO: 1406)
GGGACUUGUCACUGCCUGUCUCCUCCCUCUCCAGCAGCGACUGGAUUCUGGAGUCCAUCUAGAGGGUCUUGGGAGGG
AUGUGACUGUUGGGAAGCCC
>hsa-mir-1183 MI0006276
(SEQ ID NO: 1407)
AUUAUUCAAAUGCUCGGAGACACAGAACAUUAGAGAAGACAGGAGUUCACUGUAGGUGAUGGUGAGAGUGGGCAUGG
AGCAGGAGUGCC
>hsa-mir-1184-1 MI0006277
(SEQ ID NO: 1408)
CUUGCAGAACGAGGUGAAGGAGGUGGUUCUGCUCAGCAGUCAACAGUGGCCACAUCUCCACCUGCAGCGACUUGAUG
GCUUCCGUGUCCUUUUCGUGGG
>hsa-mir-1184-2 MI0015971
(SEQ ID NO: 1409)
CUUGCAGAACGAGGUGAAGGAGGUGGUUCUGCUCAGCAGUCAACAGUGGCCACAUCUCCACCUGCAGCGACUUGAUG
GCUUCCGUGUCCUUUUCGUGGG
>hsa-mir-1184-3 MI0015972
(SEQ ID NO: 1410)
CUUGCAGAACGAGGUGAAGGAGGUGGUUCUGCUCAGCAGUCAACAGUGGCCACAUCUCCACCUGCAGCGACUUGAUG
GCUUCCGUGUCCUUUUCGUGGG
>hsa-mir-1185-l MI0003844
(SEQ ID NO: 1411)
UUUGGUACUUGAAGAGAGGAUACCCUUUGUAUGUUCACUUGAUUAAUGGCGAAUAUACAGGGGGAGACUCUUAUUUG
CGUAUCAAA
>hsa-mir-1185-2 MI0003821
(SEQ ID NO: 1412)
UUUGGUACUUAAAGAGAGGAUACCCUUUGUAUGUUCACUUGAUUAAUGGCGAAUAUACAGGGGGAGACUCUCAUUUG
CGUAUCAAA
>hsa-mir-1193 MI0014205
(SEQ ID NO: 1413)
GUAGCUGAGGGGAUGGUAGACCGGUGACGUGCACUUCAUUUACGAUGUAGGUCACCCGUUUGACUAUCCACCAGCGC
>hsa-mir-1197 MI0006656
(SEQ ID NO: 1414)
ACUUCCUGGUAUUUGAAGAUGCGGUUGACCAUGGUGUGUACGCUUUAUUUGUGACGUAGGACACAUGGUCUACUUCU
UCUCAAUAUCA
>hsa-mir-1200 MI0006332
(SEQ ID NO: 1415)
UGCUACUUCUCCUGAGCCAUUCUGAGCCUCAAUCACUUGCCAGAGAGAUUGGUUCAGGAAUUUGUCAGGGAUAGCC
>hsa-mir-1202 MI0006334
(SEQ ID NO: 1416)
CCUGCUGCAGAGGUGCCAGCUGCAGUGGGGGAGGCACUGCCAGGGCUGCCCACUCUGCUUAGCCAGCAGGUGCCAAG
AACAGG
>hsa-mir-1203 MI0006335
(SEQ ID NO: 1417)
UCCUCCCCGGAGCCAGGAUGCAGCUCAAGCCACAGCAGGGUGUUUAGCGCUCUUCAGUGGCUCCAGAUUGUGGCGCU
GGUGCAGG
>hsa-mir-1204 MI0006337
(SEQ ID NO: 1418)
ACCUCGUGGCCUGGUCUCCAUUAUUUGAGAUGAGUUACAUCUUGGAGGUGAGGACGUGCCUCGUGGU
>hsa-mir-1205 MI0006338
(SEQ ID NO: 1419)
GAAGGCCUCUGCAGGGUUUGCUUUGAGGUACUUCCUUCCUGUCAACCCUGUUCUGGAGUCUGU
>hsa-mir-1206 MI0006339
(SEQ ID NO: 1420)
CAGUGUUCAUGUAGAUGUUUAAGCUCUUGCAGUAGGUUUUUGCAAGCUAGUGAACGCUG
>hsa-mir-1207 MI0006340
(SEQ ID NO: 1421)
GCAGGGCUGGCAGGGAGGCUGGGAGGGGCUGGCUGGGUCUGGUAGUGGGCAUCAGCUGGCCCUCAUUUCUUAAGACA
GCACUUCUGU
>hsa-mir-1208 MI0006341
(SEQ ID NO: 1422)
CACCGGCAGAAUCACUGUUCAGACAGGCGGAGACGGGUCUUUCUCGCCCUCUGAUGAGUCACCACUGUGGUGG
>hsa-mir-1224 MI0003764
(SEQ ID NO: 1423)
GUGAGGACUCGGGAGGUGGAGGGUGGUGCCGCCGGGGCCGGGCGCUGUUUCAGCUCGCUUCUCCCCCCACCUCCUCU
CUCCUCAG
>hsa-mir-1225 MI0006311
(SEQ ID NO: 1424)
GUGGGUACGGCCCAGUGGGGGGGAGAGGGACACGCCCUGGGCUCUGCCCAGGGUGCAGCCGGACUGACUGAGCCCCU
GUGCCGCCCCCAG
>hsa-mir-1226 MI0006313
(SEQ ID NO: 1425)
GUGAGGGCAUGCAGGCCUGGAUGGGGCAGCUGGGAUGGUCCAAAAGGGUGGCCUCACCAGCCCUGUGUUCCCUAG
>hsa-mir-1227 MI0006316
(SEQ ID NO: 1426)
GUGGGGCCAGGCGGUGGUGGGCACUGCUGGGGUGGGCACAGCAGCCAUGCAGAGCGGGCAUUUGACCCCGUGCCACC
CUUUUCCCCAG
>hsa-mir-1228 MI0006318
(SEQ ID NO: 1427)
GUGGGCGGGGGCAGGUGUGUGGUGGGUGGUGGCCUGCGGUGAGCAGGGCCCUCACACCUGCCUCGCCCCCCAG
>hsa-mir-1229 MI0006319
(SEQ ID NO: 1428)
GUGGGUAGGGUUUGGGGGAGAGCGUGGGCUGGGGUUCAGGGACACCCUCUCACCACUGCCCUCCCACAG
>hsa-mir-1231 MI0006321
(SEQ ID NO: 1429)
GUCAGUGUCUGGGCGGACAGCUGCAGGAAAGGGAAGACCAAGGCUUGCUGUCUGUCCAGUCUGCCACCCUACCCUGU
CUGUUCUUGCCACAG
>hsa-mir-1233-1 MI0006323
(SEQ ID NO: 1430)
GUGAGUGGGAGGCCAGGGCACGGCAGGGGGAGCUGCAGGGCUAUGGGAGGGGCCCCAGCGUCUGAGCCCUGUCCUCC
CGCAG
>hsa-mir-1233-2 MI0015973
(SEQ ID NO: 1431)
GUGAGUGGGAGGCCAGGGCACGGCAGGGGGAGCUGCAGGGCUAUGGGAGGGGCCCCAGCGUCUGAGCCCUGUCCUCC
CGCAG
>hsa-mir-1234 MI0006324
(SEQ ID NO: 1432)
GUGAGUGUGGGGUGGCUGGGGGGGGGGGGGGGGGGCCGGGGACGGCUUGGGCCUGCCUAGUCGGCCUGACCACCCAC
CCCACAG
>hsa-mir-1236 MI0006326
(SEQ ID NO: 1433)
GUGAGUGACAGGGGAAAUGGGGAUGGACUGGAAGUGGGCAGCAUGGAGCUGACCUUCAUCAUGGCUUGGCCAACAUA
AUGCCUCUUCCCCUUGUCUCUCCAG
>hsa-mir-1237 MI0006327
(SEQ ID NO: 1434)
GUGGGAGGGCCCAGGCGCGGGCAGGGGUGGGGGUGGCAGAGCGCUGUCCCGGGGGCGGGGCCGAAGCGCGGCGACCG
UAACUCCUUCUGCUCCGUCCCCCAG
>hsa-mir-1238 MI0006328
(SEQ ID NO: 1435)
GUGAGUGGGAGCCCCAGUGUGUGGUUGGGGCCAUGGCGGGUGGGCAGCCCAGCCUCUGAGCCUUCCUCGUCUGUCUG
CCCCAG
>hsa-mir-1243 MI0006373
(SEQ ID NO: 1436)
CUAAAACUGGAUCAAUUAUAGGAGUGAAAUAAAGGUCCAUCUCCUGCCUAUUUAUUACUUUGCUUUGGUAAUAAAUC
UAUUUUUAAAAGAACC
>hsa-mir-1244-1 MI0006379
(SEQ ID NO: 1437)
AUCUUAUUCCGAGCAUUCCAGUAACUUUUUUGUGUAUGUACUUAGCUGUACUAUAAGUAGUUGGUUUGUAUGAGAUG
GUUAAAAA
>hsa-mir-1244-2 MI0015974
(SEQ ID NO: 1438)
AUCUUAUUCCGAGCAUUCCAGUAACUUUUUUGUGUAUGUACUUAGCUGUACUAUAAGUAGUUGGUUUGUAUGAGAUG
GUUAAAAA
>hsa-mir-1244-3 MI0015975
(SEQ ID NO: 1439)
AUCUUAUUCCGAGCAUUCCAGUAACUUUUUUGUGUAUGUACUUAGCUGUACUAUAAGUAGUUGGUUUGUAUGAGAUG
GUUAAAAA
>hsa-mir-1245a MI0006380
(SEQ ID NO: 1440)
AUUUAUGUAUAGGCCUUUAGAUCAUCUGAUGUUGAAUACUCUUUAAGUGAUCUAAAGGCCUACAUAUAAA
>hsa-mir-1245b MI0017431
(SEQ ID NO: 1441)
UUUAUAUGUAGGCCUUUAGAUCACUUAAAGAGUAUUCAACAUCAGAUGAUCUAAAGGCCUAUACAUAAA
>hsa-mir-1246 MI0006381
(SEQ ID NO: 1442)
UGUAUCCUUGAAUGGAUUUUUGGAGCAGGAGUGGACACCUGACCCAAAGGAAAUCAAUCCAUAGGCUAGCAAU
>hsa-mir-1247 MI0006382
(SEQ ID NO: 1443)
CCGCUUGCCUCGCCCAGCGCAGCCCCGGCCGCUGGGCGCACCCGUCCCGUUCGUCCCCGGACGUUGCUCUCUACCCC
GGGAACGUCGAGACUGGAGCGCCCGAACUGAGCCACCUUCGCGGACCCCGAGAGCGGCG
>hsa-mir-1248 MI0006383
(SEQ ID NO: 1444)
UUUACCUUCUUGUAUAAGCACUGUGCUAAAAUUGCAGACACUAGGACCAUGUCUUGGUUUUUGCAAUAAUGCUAGCA
GAGUACACACAAGAAGAAAAGUAACAGCA
>hsa-mir-1249 MI0006384
(SEQ ID NO: 1445)
GGGAGGAGGGAGGAGAUGGGCCAAGUUCCCUCUGGCUGGAACGCCCUUCCCCCCCUUCUUCACCUG
>hsa-mir-1250 MI0006385
(SEQ ID NO: 1446)
CUGUCCCGCUGGCCUGGCAGGUGACGGUGCUGGAUGUGGCCUUUUUGCCUUUUCUAAAGGCCACAUUUUCCAGCCCA
UUCAACCUUCCAGAGCCCUCUGAAGUGGCCACAGGC
>hsa-mir-1251 MI0006386
(SEQ ID NO: 1447)
GUGGACUCUAGCUGCCAAAGGCGCUUCUCCUUCUGAACAGAGCGCUUUGCUCAGCCAGUGUAGACAUGGC
>hsa-mir-1252 MI0006434
(SEQ ID NO: 1448)
AGAAAGAAGGAAAUUGAAUUCAUUUAGAAAAGAGAAUUCCAAAUGAGCUUAAUUUCCUUUUUUCU
>hsa-mir-1253 MI0006387
(SEQ ID NO: 1449)
AGCAGCAAGAGAUAGAAUCCAAAAGAGAAGAAGAUCAGCCUGCAGAUGUGGACUGCUAAAUGCAGGCUGAUCUUCUC
CCCUUUGGGAUUCUCUUAUGAGAAGCCA
>hsa-mir-1254-1 MI0006388
(SEQ ID NO: 1450)
GGUGGGAGGAUUGCUUGAGCCUGGAAGCUGGAGCCUGCAGUGAACUAUCAUUGUGCCACUGUACUCCAGCCUAGGCA
ACAAAAUGAAAUCCUGUCUA
>hsa-mir-1254-2 MI0016747
(SEQ ID NO: 1451)
CUGAGCCUGGAAGCUGGAGCCUGCAGUGAGCUAUGAUCAUGUCCCUGUACUCUAGCCUGGGCA
>hsa-mir-1255a MI0006389
(SEQ ID NO: 1452)
AUUGGAAAUCCUUUGAGUUGCUUCUCAAGGAUGAGCAAAGAAAGUAGAUUUUUUAGAUUCUAAAGAAACUAUCUUCU
UUGCUCAUCCUUGAGAAGCAACUCCUUAUCCAUUAA
>hsa-mir-1255b-1 MI0006435
(SEQ ID NO: 1453)
UACGGAUGAGCAAAGAAAGUGGUUUCUUAAAAUGGAAUCUACUCUUUGUGAAGAUGCUGUGAA
>hsa-mir-1255b-2 MI0006436
(SEQ ID NO: 1454)
UCUUACGGAUGAGCAAAGAAAGUGGUUUGCGCCUCAAGAAACCACUUUCUUUGCUCAUCCAUAAGGA
>hsa-mir-1256 MI0006390
(SEQ ID NO: 1455)
AGUCAGCCUGUUGAAGCUUUGAAGCUUUGAUGCCAGGCAUUGACUUCUCACUAGCUGUGAAAGUCCUAGCUAAAGAG
AAGUCAAUGCAUGACAUCUUGUUUCAAUAGAUGGCUGUUUCA
>hsa-mir-1257 MI0006391
(SEQ ID NO: 1456)
GCCCUGGGCUUGUGCUUGGGGAGUGAAUGAUGGGUUCUGACCCCCAUGCACCCCUGUGGGCCCCUGGCAUCACUGGC
CCCAUCCUUCACCCCUGCCAACCACGCUUGCCCUGUGCCU
>hsa-mir-1258 MI0006392
(SEQ ID NO: 1457)
CUGUGGCUUCCACGACCUAAUCCUAACUCCUGCGAGUCCCUGGAGUUAGGAUUAGGUCGUGGAAGCCACAGGA
>hsa-mir-1260a MI0006394
(SEQ ID NO: 1458)
ACCUUUCCAGCUCAUCCCACCUCUGCCACCAAAACACUCAUCGCGGGGUCAGAGGGAGUGCCAAAAAAGGUAA
>hsa-mir-1260b MI0014197
(SEQ ID NO: 1459)
UCUCCGUUUAUCCCACCACUGCCACCAUUAUUGCUACUGUUCAGCAGGUGCUGCUGGUGGUGAUGGUGAUAGUCUGG
UGGGGGCGGUGG
>hsa-mir-1261 MI0006396
(SEQ ID NO: 1460)
UGCUAUGGAUAAGGCUUUGGCUUAUGGGGAUAUUGUGGUUGAUCUGUUCUAUCCAGAUGACUGAAACUUUCUCCAUA
GCAGC
>hsa-mir-1262 MI0006397
(SEQ ID NO: 1461)
AUCUACAAUGGUGAUGGGUGAAUUUGUAGAAGGAUGAAAGUCAAAGAAUCCUUCUGGGAACUAAUUUUUGGCCUUCA
ACAAGAAUUGUGAUAU
>hsa-mir-1263 MI0006398
(SEQ ID NO: 1462)
CUACCCCAAAAUAUGGUACCCUGGCAUACUGAGUAUUUUAAUACUGGCAUACUCAGUAUGCCAUGUUGCCAUAUUUU
GGGGUAGCA
>hsa-mir-1264 MI0003758
(SEQ ID NO: 1463)
AGGUCCUCAAUAAGUAUUUGUUGAAAGAAUAAAUAAACCAACAAGUCUUAUUUGAGCACCUGUUAUGUG
>hsa-mir-1265 MI0006401
(SEQ ID NO: 1464)
AUGGUUUGGGACUCAGGAUGUGGUCAAGUGUUGUUAAGGCAUGUUCAGGAACAAUACUUGACCACAUUUUGAAUUCC
AAACCAUAU
>hsa-mir-1266 MI0006403
(SEQ ID NO: 1465)
ACAGGUAGUGUCCCUCAGGGCUGUAGAACAGGGCUGGGAUUACUAAAGCCCUGUUCUAUGCCCUGAGGGACACUGAG
CAUGUCA
>hsa-mir-1267 MI0006404
(SEQ ID NO: 1466)
CUCCCAAAUCUCCUGUUGAAGUGUAAUCCCCACCUCCAGCAUUGGGGAUUACAUUUCAACAUGAGAUUUGGAUGAGGA
>hsa-mir-1268a MI0006405
(SEQ ID NO: 1467)
UAGCCGGGCGUGGUGGUGGGGGCCUGUGGUCCCAGCUACUUUGGAGGCUGAG
>hsa-mir-1268b MI0016748
(SEQ ID NO: 1468)
ACCCGGGCGUGGUGGUGGGGGUGGGUGCCUGUAAUUCCAGCUAGUUGGGA
>hsa-mir-1269a MI0006406
(SEQ ID NO: 1469)
UGGAUUGCCUAGACCAGGGAAGCCAGUUGGCAUGGCUCAGUCCAAGUCUGACCACCUGAGGAAUGCCUGGACUGAGC
CGUGCUACUGGCUUCCCUGGUCUCCAGC
>hsa-mir-1269b MI0016888
(SEQ ID NO: 1470)
UGAGGUUUCUGGACUGAGCCAUGCUACUGGCUUCUCUGGUUCUCCAGCUUACAGAUGGCUUAUCAUGGGACCUCU
>hsa-mir-1270-1 MI0006407
(SEQ ID NO: 1471)
CACAGAGUUAUACUGGAGAUAUGGAAGAGCUGUGUUGGGUAUAAGUAACAGGCUUUUCUUUAUCUUCUAUGUGGCUC
UUUGCA
>hsa-mir-1270-2 MI0015976
(SEQ ID NO: 1472)
CACAGAGUUAUACUGGAGAUAUGGAAGAGCUGUGUUGGGUAUAAGUAACAGGCUUUUCUUUAUCUUCUAUGUGGCUC
UUUGCA
>hsa-mir-1271 MI0003814
(SEQ ID NO: 1473)
CACCCAGAUCAGUGCUUGGCACCUAGCAAGCACUCAGUAAAUAUUUGUUGAGUGCCUGCUAUGUGCCAGGCAUUGUG
CUGAGGGCU
>hsa-mir-1272 MI0006408
(SEQ ID NO: 1474)
CCAGAUCAGAUCUGGGUGCGAUGAUGAUGGCAGCAAAUUCUGAAAACGUGCUCAGUGUCUUUAUAACAGGAAAGCCG
UAAACUUAGAAAUGUAGGCUGCAGCUCGUGUGCUCUGUGGUCUGGGCUGGUA
>hsa-mir-1273a MI0006409
(SEQ ID NO: 1475)
UGAGGCAGGAGAAUUGCUUGAACCCGGGUGGUGGAGGUUGCAGUGAGCCAAGAUUGCGCCACUGCACUCCAGCCUGG
GCGACAAAGCAAGACUCUUUCUUGGA
>hsa-mir-1273c MI0014171
(SEQ ID NO: 1476)
UGCAGCCUGGGCGACAAAACGAGACCCUGUCUUUUUUUUUUUCUGAGACAGAGUCUCGUUCUGUUGCCCAAGCUGGA
>hsa-mir-1273d MI0014254
(SEQ ID NO: 1477)
GAAUCGCUUGAACCCAUGAGGUUGAGGCUGCAGUGAGCCAAGAUCGUGCCACUGCACUUCAGCCUGGGUGACAAGAG
CGAAACUUC
>hsa-mir-1273e MI0016059
(SEQ ID NO: 1478)
UGAGGCAGGAGAAUUGCUUGAACCCAGGAAGUGGAGGCUGCAGUGAGCCGAGAUCGAGCCACUGUACUCCAGCCUGG
GUGACACAGCGAGACUCCAGUCUCA
>hsa-mir-1273f MI0018002
(SEQ ID NO: 1479)
AGGUGGGAGGAUUGCUUGAGCCUGGGAGAUGGAGGUUGCAGUGAGCUGAGAUCACGCAACUGCACCCCCAGCCUGGG
CCAUAGAGUCAGUCCUUGUCUC
>hsa-mir-1273g MI0018003
(SEQ ID NO: 1480)
GAGGUGGGAGGAUUGCUUGAGUCAGGGUGGUUGAGGCUGCAGUAAGUUGUGAUCAUACCACUGCACUCCAGCCUGAG
UGACAGAGCAAGACCUUGUCUCA
>hsa-mir-1275 MI0006415
(SEQ ID NO: 1481)
CCUCUGUGAGAAAGGGUGUGGGGGAGAGGCUGUCUUGUGUCUGUAAGUAUGCCAAACUUAUUUUCCCCAAGGCAGAG
GGA
>hsa-mir-1276 MI0006416
(SEQ ID NO: 1482)
CCCCAGCUAGGUAAAGAGCCCUGUGGAGACACCUGGAUUCAGAGAACAUGUCUCCACUGAGCACUUGGGCCUUGAUG
GCGGCU
>hsa-mir-1277 MI0006419
(SEQ ID NO: 1483)
ACCUCCCAAAUAUAUAUAUAUAUGUACGUAUGUGUAUAUAAAUGUAUACGUAGAUAUAUAUGUAUUUUUGGUGGGUUU
>hsa-mir-1278 MI0006425
(SEQ ID NO: 1484)
AUUUGCUCAUAGAUGAUAUGCAUAGUACUCCCAGAACUCAUUAAGUUGGUAGUACUGUGCAUAUCAUCUAUGAGCGA
AUAG
>hsa-mir-1279 MI0006426
(SEQ ID NO: 1485)
AUAUUCACAAAAAUUCAUAUUGCUUCUUUCUAAUGCCAAGAAAGAAGAGUAUAAGAACUUCC
>hsa-mir-1280 MI0006437
(SEQ ID NO: 1486)
UCUGUCCCACCGCUGCCACCCUCCCCUCUGCCUCAGUGUGCCAGGCAUCAGCACUCACUCACAGAGGCAGGCUGGAU
GGCGGGUGGGACAACAG
>hsa-mir-1281 MI0006428
(SEQ ID NO: 1487)
AGGGGGCACCGGGAGGAGGUGAGUGUCUCUUGUCGCCUCCUCCUCUCCCCCCUU
>hsa-mir-1282 MI0006429
(SEQ ID NO: 1488)
CCUUCUUCUCGUUUGCCUUUUUCUGCUUCUGCUGCAUGAUCUCCGAGUCCCUGGGGGUAGAGAUGAUGGGGCACUGG
GAGGUACCAGAGGGCAAAAAGGAC
>hsa-mir-1283-1 MI0003832
(SEQ ID NO: 1489)
CUCAAGCUAUGAGUCUACAAAGGAAAGCGCUUUCUGUUGUCAGAAAGAAGAGAAAGCGCUUCCCUUUUGAGGGUUAC
GGUUUGAGAA
>hsa-mir-1283-2 MI0006430
(SEQ ID NO: 1490)
CUCAAGCUGUGAGUCUACAAAGGAAAGCGCUUUCUGUUGUCUGAAAGAAAAGAAAUCGCUUCCCUUUGGAGUGUUAC
GGUUUGAGAA
>hsa-mir-1284 MI0006431
(SEQ ID NO: 1491)
AUUUUGAUAUAUAAGCCAGUUUAAUGUUUUCUAUACAGACCCUGGCUUUUCUUAAAUUUUAUAUAUUGGAAAGCCCA
UGUUUGUAUUGGAAACUGCUGGUUUCUUUCAUACUGAAAAUCU
>hsa-mir-1285-1 MI0006346
(SEQ ID NO: 1492)
UGUAGAGAUAGGAUCUCACUUUGUUGCCCAGGCUGGUCUCAAACUCCUGGUCUGGGCAACAAAGUGAGACCUUAUCU
CUACAAG
>hsa-mir-1285-2 MI0006347
(SEQ ID NO: 1493)
UUUGGGAGGCCGAGGCUGGUGCAUCACUUGAGCCCAGCAAUUUGAGACCAAUCUGGGCAACAAAGUGAGACCUCCGU
CUCUACAAAGA
>hsa-mir-1286 MI0006348
(SEQ ID NO: 1494)
UGUCCUCUGGGGACUCAGCUUGCUCUGGCUGCUGGAUUGAAUUAGCUGCAGGACCAAGAUGAGCCCUUGGUGGAGACA
>hsa-mir-1287 MI0006349
(SEQ ID NO: 1495)
GUUGUGCUGUCCAGGUGCUGGAUCAGUGGUUCGAGUCUGAGCCUUUAAAAGCCACUCUAGCCACAGAUGCAGUGAUU
GGAGCCAUGACAA
>hsa-mir-1288 MI0006432
(SEQ ID NO: 1496)
GAGGGUGUUGAUCAGCAGAUCAGGACUGUAACUCACCAUAGUGGUGGACUGCCCUGAUCUGGAGACCACUGCCUU
>hsa-mir-1289-1 MI0006350
(SEQ ID NO: 1497)
UUCUCAAUUUUUAGUAGGAAUUAAAAACAAAACUGGUAAAUGCAGACUCUUGGUUUCCACCCCCAGAGAAUCCCUAA
ACCGGGGGUGGAGUCCAGGAAUCUGCAUUUUAGAAAGUACCCAGGGUGAUUCUGAUAAUUGGGAACA
>hsa-mir-1289-2 MI0006351
(SEQ ID NO: 1498)
CCACGGUCCUAGUUAAAAAGGCACAUUCCUAGACCCUGCCUCAGAACUACUGAACAGAGUCACUGGGUGUGGAGUCC
AGGAAUCUGCAUUUUUACCCCUAUCGCCCCCGCC
>hsa-mir-1290 MI0006352
(SEQ ID NO: 1499)
GAGCGUCACGUUGACACUCAAAAAGUUUCAGAUUUUGGAACAUUUCGGAUUUUGGAUUUUUGGAUCAGGGAUGCUCAA
>hsa-mir-1291 MI0006353
(SEQ ID NO: 1500)
GGUAGAAUUCCAGUGGCCCUGACUGAAGACCAGCAGUUGUACUGUGGCUGUUGGUUUCAAGCAGAGGCCUAAAGGAC
UGUCUUCCUG
>hsa-mir-1292 MI0006433
(SEQ ID NO: 1501)
CCUGGGAACGGGUUCCGGCAGACGCUGAGGUUGCGUUGACGCUCGCGCCCCGGCUCCCGUUCCAGG
>hsa-mir-1293 MI0006355
(SEQ ID NO: 1502)
AGGUUGUUCUGGGUGGUCUGGAGAUUUGUGCAGCUUGUACCUGCACAAAUCUCCGGACCACUUAGUCUUUA
>hsa-mir-1294 MI0006356
(SEQ ID NO: 1503)
CACCUAAUGUGUGCCAAGAUCUGUUCAUUUAUGAUCUCACCGAGUCCUGUGAGGUUGGCAUUGUUGUCUGGCAUUGU
CUGAUAUACAACAGUGCCAACCUCACAGGACUCAGUGAGGUGAAACUGAGGAUUAGGAAGGUGUA
>hsa-mir-1295a MI0006357
(SEQ ID NO: 1504)
AGGACAUUUUGCCCAGAUCCGUGGCCUAUUCAGAAAUGUGGCCUGUGAUUAGGCCGCAGAUCUGGGUGAAAUGUCCU
CC
>hsa-mir-1295b MI0019146
(SEQ ID NO: 1505)
CACCCAGAUCUGCGGCCUAAUCACAGGCCACAUUUCUGAAUAGGCCACGGAUCUGGGCAA
>hsa-mir-1296 MI0003780
(SEQ ID NO: 1506)
ACCUACCUAACUGGGUUAGGGCCCUGGCUCCAUCUCCUUUAGGAAAACCUUCUGUGGGGAGUGGGGCUUCGACCCUA
ACCCAGGUGGGCUGU
>hsa-mir-1297 MI0006358
(SEQ ID NO: 1507)
UGUUUAUCUCUAGGGUUGAUCUAUUAGAAUUACUUAUCUGAGCCAAAGUAAUUCAAGUAAUUCAGGUGUAGUGAAAC
>hsa-mir-1298 MI0003938
(SEQ ID NO: 1508)
AGACGAGGAGUUAAGAGUUCAUUCGGCUGUCCAGAUGUAUCCAAGUACCCUGUGUUAUUUGGCAAUAAAUACAUCUG
GGCAACUGACUGAACUUUUCACUUUUCAUGACUCA
>hsa-mir-1299 MI0006359
(SEQ ID NO: 1509)
CCUCAUGGCAGUGUUCUGGAAUCCUACGUGAGGGACAAUCAUUCAGACCCACGUAGCAGUGUUCUGGAAUUCUGUGU
GAGGGA
>hsa-mir-1301 MI0003815
(SEQ ID NO: 1510)
GGAUUGUGGGGGGUCGCUCUAGGCACCGCAGCACUGUGCUGGGGAUGUUGCAGCUGCCUGGGAGUGACUUCACACAG
UCCUC
>hsa-mir-1302-1 MI0006362
(SEQ ID NO: 1511)
CAGAAAGCCCAGUUAAAUUUGAAUUUCAAGUAAACAAUGAAUAAUUGUGUAUGUAAGAAUAUCCCAUACAAUAUUUG
GGACAUACUUAUGCUAAAAAUUAUUCCUUGCUUAUCUGAAAUUCAAAUGUAACUAGGAUUCCUGUA
>hsa-mir-1302-10 MI0015979
(SEQ ID NO: 1512)
GGAUGCCCAGCUAGUUUGAAUUUUAGAUAAACAACGAAUAAUUUCGUAGCAUAAAUAUGUCCCAAGCUUAGUUUGGG
ACAUACUUAUGCUAAAAAACAUUAUUGGUUGUUUAUCUGAGAUUCAGAAUUAAGCAUUUUA
>hsa-mir-1302-11 MI0015980
(SEQ ID NO: 1513)
GGAUGCCCAGCUAGUUUGAAUUUUAGAUAAACAACGAAUAAUUUCGUAGCAUAAAUAUGUCCCAAGCUUAGUUUGGG
ACAUACUUAUGCUAAAAAACAUUAUUGGUUGUUUAUCUGAGAUUCAGAAUUAAGCAUUUUA
>hsa-mir-1302-2 MI0006363
(SEQ ID NO: 1514)
GGAUGCCCAGCUAGUUUGAAUUUUAGAUAAACAACGAAUAAUUUCGUAGCAUAAAUAUGUCCCAAGCUUAGUUUGGG
ACAUACUUAUGCUAAAAAACAUUAUUGGUUGUUUAUCUGAGAUUCAGAAUUAAGCAUUUUA
>hsa-mir-1302-3 MI0006364
(SEQ ID NO: 1515)
GGAUGCCCAGCUAGUUUGAAUUUUAGAUAAACAACGAAUAAUUUCGUAGCAUAAAUAUUUCCCAAGCUUAGUUUGGG
ACAUACUUAUGCUAAAAAACAUUAUUGGUUGUUUAUCUGAGAUUCAAAAUUAAGCAUUUUA
>hsa-mir-1302-4 MI0006365
(SEQ ID NO: 1516)
AAUGCAGAAGCACAGCUAAAAUUUGAAUUUCAGAUAAACAAAUUUUUCUUAGAAUAAGUAUGUCUCCAUGCAACAUU
UGGGACAUACUUAUGCUAAAAUAUUAUUUGUGUUUCAUCUGAAAUUCAAAUUCAACUGGACAUCCUGUAUUUU
>hsa-mir-1302-5 MI0006366
(SEQ ID NO: 1517)
UGCCCGGCCUCCCAUUAAAUUGGUUUUUCAGACAAAUCACAAAUUUGUUUAGGUAUAAGUAUAUCCCAUGUAAUCUU
UGGGACAUACUUAUGCUAAAAUAAUUGUUCCUUGUUGAUUGGAAAUUUUAAUUUUAAUUAGGUGUCCUGUAUU
>hsa-mir-1302-6 MI0006367
(SEQ ID NO: 1518)
AACAAAUAAUUUGGUAAUAUAUGUAUGGCCCACACAAUAUUUAGGACAACAAUAUUUGGGACAUACUUAUGCUAAAA
AAGUAUUUGUUGA
>hsa-mir-1302-7 MI0006368
(SEQ ID NO: 1519)
ACAACAUGUUUUUAGGACAUGUAUGUCUGGUGCAAUAAUUGGGACAUACUUAUGCUAAAAAAAUUAGUGUUC
>hsa-mir-1302-8 MI0006369
(SEQ ID NO: 1520)
CCCAUUUAAACUUGAAUUUCAUAUAAACACCGUAAUUUUCAGCAUUAGUGUAUCACAUGCAGUAUUUGGGACAUACU
UAUGCUAAAAAAUUAGGUGGUGUUGAUCUGAAAUUCCAGUGUAGAUGGGCA
>hsa-mir-1302-9 MI0015978
(SEQ ID NO: 1521)
GGAUGCCCAGCUAGUUUGAAUUUUAGAUAAACAACGAAUAAUUUCGUAGCAUAAAUAUGUCCCAAGCUUAGUUUGGG
ACAUACUUAUGCUAAAAAACAUUAUUGGUUGUUUAUCUGAGAUUCAGAAUUAAGCAUUUUA
>hsa-mir-1303 MI0006370
(SEQ ID NO: 1522)
GGCUGGGCAACAUAGCGAGACCUCAACUCUACAAUUUUUUUUUUUUUAAAUUUUAGAGACGGGGUCUUGCUCUGUUG
CCAGGCUUU
>hsa-mir-1304 MI0006371
(SEQ ID NO: 1523)
AAACACUUGAGCCCAGCGGUUUGAGGCUACAGUGAGAUGUGAUCCUGCCACAUCUCACUGUAGCCUCGAACCCCUGG
GCUCAAGUGAUUCA
>hsa-mir-1305 MI0006372
(SEQ ID NO: 1524)
AAGAUCCUGCUGUUUCUACCAUUAGUUUUGAAUGUUUAUUGUAAAGAUACUUUUCAACUCUAAUGGGAGAGACAGCA
GGAUUCUCC
>hsa-mir-1306 MI0006443
(SEQ ID NO: 1525)
GUGAGCAGUCUCCACCACCUCCCCUGCAAACGUCCAGUGGUGCAGAGGUAAUGGACGUUGGCUCUGGUGGUGAUGGA
CAGUCCGA
>hsa-mir-1307 MI0006444
(SEQ ID NO: 1526)
CAUCAAGACCCAGCUGAGUCACUGUCACUGCCUACCAAUCUCGACCGGACCUCGACCGGCUCGUCUGUGUUGCCAAU
CGACUCGGCGUGGCGUCGGUCGUGGUAGAUAGGCGGUCAUGCAUACGAAUUUUCAGCUCUUGUUCUGGUGAC
>hsa-mir-1321 MI0006652
(SEQ ID NO: 1527)
ACAUUAUGAAGCAAGUAUUAUUAUCCCUGUUUUACAAAUAAGGAAAUAAACUCAGGGAGGUGAAUGUGAUCAAAGAU
AG
>hsa-mir-1322 MI0006653
(SEQ ID NO: 1528)
AGUAUCAUGAAUUAGAAACCUACUUAUUACAUAGUUUACAUAAGAAGCGUGAUGAUGCUGCUGAUGCUGUA
>hsa-mir-1323 MI0003786
(SEQ ID NO: 1529)
ACUGAGGUCCUCAAAACUGAGGGGCAUUUUCUGUGGUUUGAAAGGAAAGUGCACCCAGUUUUGGGGAUGUCAA
>hsa-mir-1324 MI0006657
(SEQ ID NO: 1530)
CCUGAAGAGGUGCAUGAAGCCUGGUCCUGCCCUCACUGGGAACCCCCUUCCCUCUGGGUACCAGACAGAAUUCUAUG
CACUUUCCUGGAGGCUCCA
>hsa-mir-1343 MI0017320
(SEQ ID NO: 1531)
GCUGGCGUCGGUGCUGGGGAGCGGCCCCCGGGUGGGCCUCUGCUCUGGCCCCUCCUGGGGCCCGCACUCUCGCUCUG
GGCCCGC
>hsa-mir-1468 MI0003782
(SEQ ID NO: 1532)
GGUGGGUGGUUUCUCCGUUUGCCUGUUUCGCUGAUGUGCAUUCAACUCAUUCUCAGCAAAAUAAGCAAAUGGAAAAU
UCGUCCAUC
>hsa-mir-1469 MI0007074
(SEQ ID NO: 1533)
CUCGGCGCGGGGCGCGGGCUCCGGGUUGGGGCGAGCCAACGCCGGGG
>hsa-mir-1470 MI0007075
(SEQ ID NO: 1534)
GCCCUCCGCCCGUGCACCCCGGGGCAGGAGACCCCGCGGGACGCGCCGAGGUAGGGGGGAC
>hsa-mir-1471 MI0007076
(SEQ ID NO: 1535)
GCCCGCGUGUGGAGCCAGGUGUAGAGGCGGAGCACAGCUGGCUCUAAUUUGAGGGGC
>hsa-mir-1537 MI0007258
(SEQ ID NO: 1536)
ACAGCUGUAAUUAGUCAGUUUUCUGUCCUGUCCACACAGAAAACCGUCUAGUUACAGUUGU
>hsa-mir-1538 MI0007259
(SEQ ID NO: 1537)
GGGAACAGCAGCAACAUGGGCCUCGCUUCCUGCCGGCGCGGCCCGGGCUGCUGCUGUUCCU
>hsa-mir-1539 MI0007260
(SEQ ID NO: 1538)
GGCUCUGCGGCCUGCAGGUAGCGCGAAAGUCCUGCGCGUCCCAGAUGCCC
>hsa-mir-1587 MI0016905
(SEQ ID NO: 1539)
UUUGGGCUGGGCUGGGUUGGGCAGUUCUUCUGCUGGACUCACCUGUGACCAGC
>hsa-mir-1825 MI0008193
(SEQ ID NO: 1540)
AGAGACUGGGGUGCUGGGCUCCCCUAGACUAGGACUCCAGUGCCCUCCUCUCC
>hsa-mir-1827 MI0008195
(SEQ ID NO: 1541)
UCAGCAGCACAGCCUUCAGCCUAAAGCAAUGAGAAGCCUCUGAAAGGCUGAGGCAGUAGAUUGAAU
>hsa-mir-1908 MI0008329
(SEQ ID NO: 1542)
CGGGAAUGCCGCGGCGGGGACGGCGAUUGGUCCGUAUGUGUGGUGCCACCGGCCGCCGGCUCCGCCCCGGCCCCCGC
CCC
>hsa-mir-1909 MI0008330
(SEQ ID NO: 1543)
CAUCCAGGACAAUGGUGAGUGCCGGUGCCUGCCCUGGGGCCGUCCCUGCGCAGGGGCCGGGUGCUCACCGCAUCUGC
CCC
>hsa-mir-1910 MI0008331
(SEQ ID NO: 1544)
UGUCCCUUCAGCCAGUCCUGUGCCUGCCGCCUUUGUGCUGUCCUUGGAGGGAGGCAGAAGCAGGAUGACAAUGAGGG
CAA
>hsa-mir-1911 MI0008332
(SEQ ID NO: 1545)
UCGGCAUCUGCUGAGUACCGCCAUGUCUGUUGGGCAUCCACAGUCUCCCACCAGGCAUUGUGGUCUCCGCUGACGCU
UUG
>hsa-mir-1912 MI0008333
(SEQ ID NO: 1546)
CUCUAGGAUGUGCUCAUUGCAUGGGCUGUGUAUAGUAUUAUUCAAUACCCAGAGCAUGCAGUGUGAACAUAAUAGAG
AUU
>hsa-mir-1913 MI0008334
(SEQ ID NO: 1547)
ACCUCUACCUCCCGGCAGAGGAGGCUGCAGAGGCUGGCUUUCCAAAACUCUGCCCCCUCCGCUGCUGCCAAGUGGCU
GGU
>hsa-mir-1914 MI0008335
(SEQ ID NO: 1548)
CGUGUGAGCCCGCCCUGUGCCCGGCCCACUUCUGCUUCCUCUUAGCGCAGGAGGGGUCCCGCACUGGGAGGGGCCCU
CAC
>hsa-mir-1915 MI0008336
(SEQ ID NO: 1549)
UGAGAGGCCGCACCUUGCCUUGCUGCCCGGGCCGUGCACCCGUGGGCCCCAGGGCGACGCGGCGGGGGCGGCCCUAG
CGA
>hsa-mir-1972-1 MI0009982
(SEQ ID NO: 1550)
UAUAGGCAUGUGCCACCACACCUGGCUUAAAUGUGUCAUUUAAAAAUUCAGGCCAGGCACAGUGGCUCAUGCCUGUA
>hsa-mir-1972-2 MI0015977
(SEQ ID NO: 1551)
UAUAGGCAUGUGCCACCACACCUGGCUUAAAUGUGUCAUUUAAAAAUUCAGGCCAGGCACAGUGGCUCAUGCCUGUA
>hsa-mir-1973 MI0009983
(SEQ ID NO: 1552)
UAUGUUCAACGGCCAUGGUAUCCUGACCGUGCAAAGGUAGCAUA
>hsa-mir-1976 MI0009986
(SEQ ID NO: 1553)
GCAGCAAGGAAGGCAGGGGUCCUAAGGUGUGUCCUCCUGCCCUCCUUGCUGU
>hsa-mir-2052 MI0010486
(SEQ ID NO: 1554)
CUGUUUUGAUAACAGUAAUGUCCCUUUAGUUCAAAGUUACCAGCUAUCAAAACAA
>hsa-mir-2053 MI0010487
(SEQ ID NO: 1555)
CUUGCCAUGUAAAUACAGAUUUAAUUAACAUUUGCAACCUGUGAAGAUGCAAAACUUUAAGUGUUAAUUAAACCUCU
AUUUACAUAGCAAG
>hsa-mir-2054 MI0010488
(SEQ ID NO: 1556)
CUGUAAUAUAAAUUUAAUUUAUUCUCUAUCAUUAAAAAAUGUAUUACAG
>hsa-mir-2110 MI0010629
(SEQ ID NO: 1557)
CAGGGGUUUGGGGAAACGGCCGCUGAGUGAGGCGUCGGCUGUGUUUCUCACCGCGGUCUUUUCCUCCCACUCUUG
>hsa-mir-2113 MI0003939
(SEQ ID NO: 1558)
UUUUCAAAGCAAUGUGUGACAGGUACAGGGACAAAUCCCGUUAAUAAGUAAGAGGAUUUGUGCUUGGCUCUGUCACA
UGCCACUUUGAAAA
>hsa-mir-2114 MI0010633
(SEQ ID NO: 1559)
CCUCCAUGCUCCUAGUCCCUUCCUUGAAGCGGUCGGAUAAUCACAUGACGAGCCUCAAGCAAGGGACUUCAAGCUGG
UGG
>hsa-mir-2115 MI0010634
(SEQ ID NO: 1560)
ACUGUCAUCCCACUGCUUCCAGCUUCCAUGACUCCUGAUGGAGGAAUCACAUGAAUUCAUCAGAAUUCAUGGAGGCU
AGAAGCAGUAUGAGGAUCAUUUA
>hsa-mir-2116 MI0010635
(SEQ ID NO: 1561)
GACCUAGGCUAGGGGUUCUUAGCAUAGGAGGUCUUCCCAUGCUAAGAAGUCCUCCCAUGCCAAGAACUCCCAGACUA
GGA
>hsa-mir-2117 MI0010636
(SEQ ID NO: 1562)
GCUCUGAUUUACUUCUGUCCGGCAUGGUGAACAGCAGGAUUGGCUGUAGCUGUUCUCUUUGCCAAGGACAGAUCUGA
UCU
>hsa-mir-2276 MI0011282
(SEQ ID NO: 1563)
GUGUUCUUCCAGUCCGCCCUCUGUCACCUUGCAGACGGCUUUCUCUCCGAAUGUCUGCAAGUGUCAGAGGCGAGGAG
UGGCAGCUGCAU
>hsa-mir-2277 MI0011284
(SEQ ID NO: 1564)
GUGCUUCCUGCGGGCUGAGCGCGGGCUGAGCGCUGCCAGUCAGCGCUCACAUUAAGGCUGACAGCGCCCUGCCUGGC
UCGGCCGGCGAAGCUC
>hsa-mir-2278 MI0011285
(SEQ ID NO: 1565)
GUGCUGCAGGUGUUGGAGAGCAGUGUGUGUUGCCUGGGGACUGUGUGGACUGGUAUCACCCAGACAGCUUGCACUGA
CUCCAGACCCUGCCGUCAU
>hsa-mir-2355 MI0015873
(SEQ ID NO: 1566)
CAGACGUGUCAUCCCCAGAUACAAUGGACAAUAUGCUAUUAUAAUCGUAUGGCAUUGUCCUUGCUGUUUGGAGAUAA
UACUGCUGAC
>hsa-mir-2392 MI0016870
(SEQ ID NO: 1567)
AUGGUCCCUCCCAAUCCAGCCAUUCCUCAGACCAGGUGGCUCCCGAGCCACCCCAGGCUGUAGGAUGGGGGUGAGAG
GUGCUAG
>hsa-mir-2467 MI0017432
(SEQ ID NO: 1568)
GGACAGGCACCUGAGGCUCUGUUAGCCUUGGCUCUGGGUCCUGCUCCUUAGAGCAGAGGCAGAGAGGCUCAGGGUCU
GUCU
>hsa-mir-2681 MI0012062
(SEQ ID NO: 1569)
GCCCCCUUUUCACGCAUUUGUGUUUUACCACCUCCAGGAGACUGCCCAAAGACUCUUCAGUAUCAUGGAGUUGGUAA
AGCACAGAUGCAUGAAUAAUUCAACGUG
>hsa-mir-2682 MI0012063
(SEQ ID NO: 1570)
ACCUUCCUGAAAGAGGUUGGGGCAGGCAGUGACUGUUCAGACGUCCAAUCUCUUUGGGACGCCUCUUCAGCGCUGUC
UUCCCUGCCUCUGCCUUUAGGACGAGUCUCAAA
>hsa-mir-2861 MI0013006
(SEQ ID NO: 1571)
GGCGCCUCUGCAGCUCCGGCUCCCCCUGGCCUCUCGGGAACUACAAGUCCCAGGGGGCCUGGCGGUGGGCGGCGGGC
GGAAGAGGCGGGG
>hsa-mir-2909 MI0013083
(SEQ ID NO: 1572)
GGUGUUAGGGCCAACAUCUCUUGGUCUUUCCCCUGUGGUCCCAAGAUGGCUGUUGCAACUUAACGCCAU
>hsa-mir-2964a MI0017299
(SEQ ID NO: 1573)
GGAGCUCAGCCACAGAUGUCCAGCCACAAUUCUCGGUUGGCCGCAGACUCGUACAAGAAUUGCGUUUGGACAAUCAG
UGGCGAAGCCC
>hsa-mir-3064 MI0017375
(SEQ ID NO: 1574)
GGUCUGGCUGUUGUGGUGUGCAAAACUCCGUACAUUGCUAUUUUGCCACACUGCAACACCUUACAG
>hsa-mir-3065 MI0014228
(SEQ ID NO: 1575)
CUGCCCUCUUCAACAAAAUCACUGAUGCUGGAGUCGCCUGAGUCAUCACUCAGCACCAGGAUAUUGUUGGAGAGGAC
AG
>hsa-mir-3074 MI0014181
(SEQ ID NO: 1576)
GCUCGACUCCUGUUCCUGCUGAACUGAGCCAGUGUGUAAAAUGAGAACUGAUAUCAGCUCAGUAGGCACCGGAGGGC
GGGU
>hsa-mir-3115 MI0014127
(SEQ ID NO: 1577)
UCUGAAUAUGGGUUUACUAGUUGGUGGUGAAUUCAUGAGUCGCCAACUAUUAGGCCUUUAUGUCCAGA
>hsa-mir-3116-1 MI0014128
(SEQ ID NO: 1578)
CUUUAUUGAGUCCCUACUAUGUUCCAGGCACUGGGUAUCGUAGGUGCCUGGAACAUAGUAGGGACUCAAUAAAG
>hsa-mir-3116-2 MI0014129
(SEQ ID NO: 1579)
UAUUGAGUCCCUACUAUGUUCCAGGCACCUACGAUACCCAGUGCCUGGAACAUAGUAGGGACUCAAUA
>hsa-mir-3117 MI0014130
(SEQ ID NO: 1580)
CCCUAAAGGGCCAGACACUAUACGAGUCAUAUAAGGGAAGGCAUUAUAGGACUCAUAUAGUGCCAGGUGUUUUGUGGG
>hsa-mir-3118-1 MI0014131
(SEQ ID NO: 1581)
CACACUACAAUAAUUUUCAUAAUGCAAUCACACAUAAUCACUAUGUGACUGCAUUAUGAAAAUUCUUGUAGUGUG
>hsa-mir-3118-2 MI0014132
(SEQ ID NO: 1582)
ACACUACAAUAAUUUUCAUAAUGCAAUCACACAUAAUCACUAUGUGACUGCAUUAUGAAAAUUCUUGUAGUGU
>hsa-mir-3118-3 MI0014133
(SEQ ID NO: 1583)
CACACUACAAUAAUUUUCAUAAUGCAAUCACACAUAAUCACUAUGUGACUGCAUUAUGAAAAUUCUUGUAGUGUG
>hsa-mir-3118-4 MI0014207
(SEQ ID NO: 1584)
CAUACUACAAUAAUUUUCAUAAUGCAAUCACACACAAUCACCGUGUGACUGCAUUAUGAAAAUUCUUCUAGUGUG
>hsa-mir-3118-5 MI0014243
(SEQ ID NO: 1585)
CACACAUACAAUAAUAUUCAUAAUGCAAUCACACACAAUCACCAUGUGACUGCAUUAUGAAAAUUCUUCUAGUGUG
>hsa-mir-3118-6 MI0015981
(SEQ ID NO: 1586)
CAUACUACAAUAAUUUUCAUAAUGCAAUCACACACAAUCACCGUGUGACUGCAUUAUGAAAAUUCUUCUAGUGUG
>hsa-mir-3119-1 MI0014134
(SEQ ID NO: 1587)
AUUAACUCUGGCUUUUAACUUUGAUGGCAAAGGGGUAGCUAAACAAUCUAUGUCUUUGCCAUCAAAGUUAAAAGCCA
UAGUUAAU
>hsa-mir-3119-2 MI0014135
(SEQ ID NO: 1588)
AUUAACUAUGGCUUUUAACUUUGAUGGCAAAGACAUAGAUUGUUUAGCUACCCCUUUGCCAUCAAAGUUAAAAGCCA
GAGUUAAU
>hsa-mir-3120 MI0014136
(SEQ ID NO: 1589)
GUCAUGUGACUGCCUGUCUGUGCCUGCUGUACAGGUGAGCGGAUGUUCUGCACAGCAAGUGUAGACAGGCAGACACA
UGAC
>hsa-mir-3121 MI0014137
(SEQ ID NO: 1590)
AAAUGGUUAUGUCCUUUGCCUAUUCUAUUUAAGACACCCUGUACCUUAAAUAGAGUAGGCAAAGGACAGAAACAUUU
>hsa-mir-3122 MI0014138
(SEQ ID NO: 1591)
ACCAGCUCUGUUGGGACAAGAGGACGGUCUUCUUUUGGAAGGAAGACCAUCAUCUUGUCCGAAGAGAGCUGGU
>hsa-mir-3123 MI0014139
(SEQ ID NO: 1592)
AUGGAUUUGAUUGAAUGAUUCUCCCAUUUCCACAUGGAGAGUGGAGCCCAGAGAAUUGUUUAAUCAUGUAUCCAU
>hsa-mir-3124 MI0014140
(SEQ ID NO: 1593)
GCGGGCUUCGCGGGCGAAGGCAAAGUCGAUUUCCAAAAGUGACUUUCCUCACUCCCGUGAAGUCGGC
>hsa-mir-3125 MI0014142
(SEQ ID NO: 1594)
GAGAAUGGGUAGAGGAAGCUGUGGAGAGAACUCACGGUGCCUGUGGUUCGAGAUCCCCGCCUUCCUCCUCCUUUCCUC
>hsa-mir-3126 MI0014143
(SEQ ID NO: 1595)
AUGAUUAUAUGAGGGACAGAUGCCAGAAGCACUGGUUAUGAUUUGCAUCUGGCAUCCGUCACACAGAUAAUUAU
>hsa-mir-3127 MI0014144
(SEQ ID NO: 1596)
GGCCAGGCCCAUCAGGGCUUGUGGAAUGGGAAGGAGAAGGGACGCUUCCCCUUCUGCAGGCCUGCUGGGUGUGGCU
>hsa-mir-3128 MI0014145
(SEQ ID NO: 1597)
UUCCUCUGGCAAGUAAAAAACUCUCAUUUUCCUUAAAAAAUGAGAGUUUUUUACUUGCAAUAGGAA
>hsa-mir-3129 MI0014146
(SEQ ID NO: 1598)
GUACUUGGGCAGUAGUGUAGAGAUUGGUUUGCCUGUUAAUGAAUUCAAACUAAUCUCUACACUGCUGCCCAAGAGC
>hsa-mir-3130-1 MI0014147
(SEQ ID NO: 1599)
CUUGUCAUGUCUUACCCAGUCUCCGGUGCAGCCUGUUGUCAAGGCUGCACCGGAGACUGGGUAAGACAUGACAAG
>hsa-mir-3130-2 MI0014148
(SEQ ID NO: 1600)
CUUGUCAUGUCUUACCCAGUCUCCGGUGCAGCCUUGACAACAGGCUGCACCGGAGACUGGGUAAGACAUGACAAG
>hsa-mir-3131 MI0014151
(SEQ ID NO: 1601)
GAGUCGAGGACUGGUGGAAGGGCCUUUCCCCUCAGACCAAGGCCCUGGCCCCAGCUUCUUCUC
>hsa-mir-3132 MI0014152
(SEQ ID NO: 1602)
GGUGGGAUGGGUAGAGAAGGAGCUCAGAGGACGGUGCGCCUUGUUUCCCUUGAGCCCUCCCUCUCUCAUCCCACC
>hsa-mir-3133 MI0014153
(SEQ ID NO: 1603)
CAGAAAUUGUAAAGAACUCUUAAAACCCAAUAGUAAAAAGACAACCUGUUGAGUUUUAAGAGUUCUUUAUAUAUUCUG
>hsa-mir-3134 MI0014155
(SEQ ID NO: 1604)
UGUAUCCAAUGUGUAGUCUUUUAUCCCUCACAUGGAGUAAAAUAUGAUGGAUAAAAGACUACAUAUUGGGUACA
>hsa-mir-3135a MI0014156
(SEQ ID NO: 1605)
UCACUUUGGUGCCUAGGCUGAGACUGCAGUGGUGCAAUCUCAGUUCACUGCAGCCUUGACCUCCUGGGCUCAGGUGA
>hsa-mir-3135b MI0016809
(SEQ ID NO: 1606)
UGCCCAGGCUGGAGCGAGUGCAGUGGUGCAGUCAGUCCUAGCUCACUGCAGCCUCGAACUCCUGGGCU
>hsa-mir-3136 MI0014158
(SEQ ID NO: 1607)
AAUAUGAAACUGACUGAAUAGGUAGGGUCAUUUUUCUGUGACUGCACAUGGCCCAACCUAUUCAGUUAGUUCCAUAUU
>hsa-mir-3137 MI0014160
(SEQ ID NO: 1608)
UACAGGUCUGUAGCCUGGGAGCAAUGGGGUGUAUGGUAUAGGGGUAGCCUCGUGCUCCUGGGCUACAAACCUGUA
>hsa-mir-3138 MI0014161
(SEQ ID NO: 1609)
CCCUCCUCGGCACUUCCCCCACCUCACUGCCCGGGUGCCCACAAGACUGUGGACAGUGAGGUAGAGGGAGUGCCGAG
GAGGG
>hsa-mir-3139 MI0014162
(SEQ ID NO: 1610)
GGCUCAGAGUAGGAGCUCAACAGAUGCCUGUUGACUGAAUAAUAAACAGGUAUCGCAGGAGCUUUUGUUAUGUGCC
>hsa-mir-3140 MI0014163
(SEQ ID NO: 1611)
CCUCUUGAGGUACCUGAAUUACCAAAAGCUUUAUGUAUUCUGAAGUUAUUGAAAAUAAGAGCUUUUGGGAAUUCAGG
UAGUUCAGGAGUG
>hsa-mir-3141 MI0014165
(SEQ ID NO: 1612)
UCACCCGGUGAGGGCGGGUGGAGGAGGAGGGUCCCCACCAUCAGCCUUCACUGGGACGGGA
>hsa-mir-3142 MI0014166
(SEQ ID NO: 1613)
UUCAGAAAGGCCUUUCUGAACCUUCAGAAAGGCUGCUGAAUCUUCAGAAAGGCCUUUCUGAACCUUCAGAAAGGCUG
CUGAA
>hsa-mir-3143 MI0014167
(SEQ ID NO: 1614)
UAGAUAACAUUGUAAAGCGCUUCUUUCGCGGUUGGGCUGGAGCAACUCUUUACAAUGUUUCUA
>hsa-mir-3144 MI0014169
(SEQ ID NO: 1615)
AACUACACUUUAAGGGGACCAAAGAGAUAUAUAGAUAUCAGCUACCUAUAUACCUGUUCGGUCUCUUUAAAGUGUAG
UU
>hsa-mir-3145 MI0014170
(SEQ ID NO: 1616)
UAUAUGAGUUCAACUCCAAACACUCAAAACUCAUUGUUGAAUGGAAUGAGAUAUUUUGAGUGUUUGGAAUUGAACUC
GUAUA
>hsa-mir-3146 MI0014172
(SEQ ID NO: 1617)
GCUAAGUCCCUUCUUUCUAUCCUAGUAUAACUUGAAGAAUUCAAAUAGUCAUGCUAGGAUAGAAAGAAUGGGACUUG
GC
>hsa-mir-3147 MI0014173
(SEQ ID NO: 1618)
GUCCGGGUUGGGCAGUGAGGAGGGUGUGACGCCGCGAAGUGCACCUCGCCCUUGUCCAACUCGGAC
>hsa-mir-3148 MI0014175
(SEQ ID NO: 1619)
GAGUUAAGAUGGAAAAAACUGGUGUGUGCUUAUUGAUGUAGCCAACAAGCAUACAUCAGUUUUUUCCAACUUAACUC
>hsa-mir-3149 MI0014176
(SEQ ID NO: 1620)
AUACAUACAUGUACACACACAUGUCAUCCACACACAUACAUAUAUAUAUGUUUGUAUGGAUAUGUGUGUGUAUGUGU
GUGUAU
>hsa-mir-3150a MI0014177
(SEQ ID NO: 1621)
GGGAAGCAGGCCAACCUCGACGAUCUCCUCAGCACCUGAACGCCAAGGCUGGGGAGAUCCUCGAGGUUGGCCUGCUU
UCC
>hsa-mir-3150b MI0016426
(SEQ ID NO: 1622)
GAGGGAAAGCAGGCCAACCUCGAGGAUCUCCCCAGCCUUGGCGUUCAGGUGCUGAGGAGAUCGUCGAGGUUGGCCUG
CUUCCCCUC
>hsa-mir-3151 MI0014178
(SEQ ID NO: 1623)
GGGGUGAUGGGUGGGGCAAUGGGAUCAGGUGCCUCAAAGGGCAUCCCACCUGAUCCCACAGCCCACCUGUCACCCC
>hsa-mir-3152 MI0014179
(SEQ ID NO: 1624)
GUGCAGAGUUAUUGCCUCUGUUCUAACACAAGACUAGGCUUCCCUGUGUUAGAAUAGGGGCAAUAACUCUGCAC
>hsa-mir-3153 MI0014180
(SEQ ID NO: 1625)
GACAAAUUUUAAAUGUCCCUGUCCCCUUCCCCCCAAUUAAAGUAGAUUGGGGGAAAGCGAGUAGGGACAUUUAAAAU
UUGUU
>hsa-mir-3154 MI0014182
(SEQ ID NO: 1626)
GGCCCCUCCUUCUCAGCCCCAGCUCCCGCUCACCCCUGCCACGUCAAAGGAGGCAGAAGGGGAGUUGGGAGCAGAGA
GGGGACC
>hsa-mir-3155a MI0014183
(SEQ ID NO: 1627)
UCCGGGCAUCACCUCCCACUGCAGAGCCUGGGGAGCCGGACAGCUCCCUUCCCAGGCUCUGCAGUGGGAACUGAUGC
CUGGA
>hsa-mir-3155b MI0016839
(SEQ ID NO: 1628)
CCACUGCAGAGCCUGGGAAGGGAGCUGUCCGGCUCCCCAGGCUCUGCAGUGGGAGU
>hsa-mir-3156-1 MI0014184
(SEQ ID NO: 1629)
GCAGAAGAAAGAUCUGGAAGUGGGAGACACUUUUACUAUAUAUAGUGGCUCCCACUUCCAGAUCUUUCUCUCUGU
>hsa-mir-3156-2 MI0014230
(SEQ ID NO: 1630)
UGCAGAAGAAAGAUCUGGAAGUGGGAGACACUUUCACUAUAUAUAGUGGCUCCCACUUCCAGAUCUUUCUCUCUGUA
>hsa-mir-3156-3 MI0014242
(SEQ ID NO: 1631)
UGCAGAAGAAAGAUCUGGAAGUGGGAGACACUUUCACUAUAUAUAGUGGCUCCCACUUCCUGAUCUUUCUCUCUGUA
>hsa-mir-3157 MI0014185
(SEQ ID NO: 1632)
GGGAAGGGCUUCAGCCAGGCUAGUGCAGUCUGCUUUGUGCCAACACUGGGGUGAUGACUGCCCUAGUCUAGCUGAAG
CUUUUCCC
>hsa-mir-3158-1 MI0014186
(SEQ ID NO: 1633)
AUUCAGGCCGGUCCUGCAGAGAGGAAGCCCUUCUGCUUACAGGUAUUGGAAGGGCUUCCUCUCUGCAGGACCGGCCU
GAAU
>hsa-mir-3158-2 MI0014187
(SEQ ID NO: 1634)
AUUCAGGCCGGUCCUGCAGAGAGGAAGCCCUUCCAAUACCUGUAAGCAGAAGGGCUUCCUCUCUGCAGGACCGGCCU
GAAU
>hsa-mir-3159 MI0014188
(SEQ ID NO: 1635)
CCAAAGUCCUAGGAUUACAAGUGUCGGCCACGGGCUGGGCACAGUGGCUCACGCCUGUAAUCCCAGCAUUUUGG
>hsa-mir-3160-1 MI0014189
(SEQ ID NO: 1636)
GGACCUGCCCUGGGCUUUCUAGUCUCAGCUCUCCUCCAGCUCAGCUGGUCAGGAGAGCUGAGACUAGAAAGCCCAGG
GCAGGUUC
>hsa-mir-3160-2 MI0014190
(SEQ ID NO: 1637)
ACCUGCCCUGGGCUUUCUAGUCUCAGCUCUCCUGACCAGCUGAGCUGGAGGAGAGCUGAGACUAGAAAGCCCAGGGC
AGGU
>hsa-mir-3161 MI0014191
(SEQ ID NO: 1638)
CCUCGAGAGCUGAUAAGAACAGAGGCCCAGAUUGAAGUUGAAUAGUGCUGGGCCUUUGUUUUUACCAAGUUCCCUGG
>hsa-mir-3162 MI0014192
(SEQ ID NO: 1639)
CUGACUUUUUUAGGGAGUAGAAGGGUGGGGAGCAUGAACAAUGUUUCUCACUCCCUACCCCUCCACUCCCCAAAAAA
GUCAG
>hsa-mir-3163 MI0014193
(SEQ ID NO: 1640)
UUCCUCAUCUAUAAAAUGAGGGCAGUAAGACCUUCCUUCCUUGUCUUACUACCCCCAUUUUAUAGAUGAGGAA
>hsa-mir-3164 MI0014194
(SEQ ID NO: 1641)
CUUGGAAACUGUGACUUUAAGGGAAAUGGCGCACAGCAGACCCUGCAAUCAUGCCGUUUUGCUUGAAGUCGCAGUUU
CCCAGG
>hsa-mir-3165 MI0014195
(SEQ ID NO: 1642)
CCGGUGGCAAGGUGGAUGCAAUGUGACCUCAACUCUUGGUCCUCUGAGGUCACAUUGUAUCCACCUUACCACUGG
>hsa-mir-3166 MI0014196
(SEQ ID NO: 1643)
AAAUUUUUUUGAGGCCAGUAGGCAUUGUCUGCGUUAGGAUUUCUGUAUCAUCCUCCUAACGCAGACAAUGCCUACUG
GCCUAAGAAAAAUUU
>hsa-mir-3167 MI0014198
(SEQ ID NO: 1644)
GGCUGUGGAGGCACCAGUAUUUCUGAAAUUCUUUUUUCUGAAAUUCUUCAGGAAGGAUUUCAGAAAUACUGGUGUCC
CGACAGCC
>hsa-mir-3168 MI0014199
(SEQ ID NO: 1645)
AAGAUCAUGAGUUCUACAGUCAGACAGCCUGAGUUGGAGGCUCAUCUUCACUUCUUGCUGUGUGACCCUGGGCCAGU
GACUU
>hsa-mir-3169 MI0014200
(SEQ ID NO: 1646)
AUGUGAAAACAUAGGACUGUGCUUGGCACAUAGCACAAAGUCUUAUGGUACUGUGUGCCAAGCAUAGUCCUGUGUUU
UUACAU
>hsa-mir-3170 MI0014201
(SEQ ID NO: 1647)
CUGGUAACACUGGGGUUCUGAGACAGACAGUGUUAGCUCCAGAAGCAUUGCCUGUCUUAGAACCCCUAUGUUACCAG
>hsa-mir-3171 MI0014202
(SEQ ID NO: 1648)
UAUAUAUAGAGAUGUAUGGAAUCUGUAUAUAUCUAUAUAUAUGUGUAUAUAUAGAUUCCAUAAAUCUAUAUAUG
>hsa-mir-3173 MI0014204
(SEQ ID NO: 1649)
UCCCUGCCCUGCCUGUUUUCUCCUUUGUGAUUUUAUGAGAACAAAGGAGGAAAUAGGCAGGCCAGGGA
>hsa-mir-3174 MI0014208
(SEQ ID NO: 1650)
GUUACCUGGUAGUGAGUUAGAGAUGCAGAGCCCUGGGCUCCUCAGCAAACCUACUGGAUCUGCAUUUUAAUUCACAU
GCAUGGUAAU
>hsa-mir-3175 MI0014209
(SEQ ID NO: 1651)
CCUGGGGGGCGGGGAGAGAACGCAGUGACGUCUGGCCGCGUGCGCAUGUCGGGCGCUUUCUCCUCCCCCUACCCAGG
>hsa-mir-3176 MI0014210
(SEQ ID NO: 1652)
UGGCCUCUCCAGUCUGCAGCUCCCGGCAGCCUCGGGCCACACUCCCGGGAUCCCCAGGGACUGGCCUGGGACUACCG
GGGGUGGCGGCCG
>hsa-mir-3177 MI0014211
(SEQ ID NO: 1653)
CCACGUGCCAUGUGUACACACGUGCCAGGCGCUGUCUUGAGACAUUCGCGCAGUGCACGGCACUGGGGACACGUGGC
ACUGG
>hsa-mir-3178 MI0014212
(SEQ ID NO: 1654)
GAGGCUGGGCGGGGCGCGGCCGGAUCGGUCGAGAGCGUCCUGGCUGAUGACGGUCUCCCGUGCCCACGCCCCAAACG
CAGUCUC
>hsa-mir-3179-1 MI0014213
(SEQ ID NO: 1655)
CAGGAUCACAGACGUUUAAAUUACACUCCUUCUGCUGUGCCUUACAGCAGUAGAAGGGGUGAAAUUUAAACGUCUGU
GAUCCUG
>hsa-mir-3179-2 MI0014216
(SEQ ID NO: 1656)
CAGGAUCACAGACGUUUAAAUUACACUCCUUCUGCUGUGCCUUACAGCAGUAGAAGGGGUGAAAUUUAAACGUCUGU
GAUCCUG
>hsa-mir-3179-3 MI0014221
(SEQ ID NO: 1657)
CAGGAUCACAGACGUUUAAAUUACACUCCUUCUGCUGUGCCUUACAGCAGUAGAAGGGGUGAAAUUUAAACGUCUGU
GAUCCUG
>hsa-mir-3180-1 MI0014214
(SEQ ID NO: 1658)
CAGUGCGACGGGCGGAGCUUCCAGACGCUCCGCCCCACGUCGCAUGCGCCCCGGGAAAGCGUGGGGCGGAGCUUCCG
GAGGCCCCGCCCUGCUG
>hsa-mir-3180-2 MI0014215
(SEQ ID NO: 1659)
GCGACGGGCGGAGCUUCCAGACGCUCCGCCCCACGUCGCAUGCGCCCCGGGAAAGCGUGGGGCGGAGCUUCCGGAGG
CCCCGCCCUGC
>hsa-mir-3180-3 MI0014217
(SEQ ID NO: 1660)
CAGUGCGACGGGCGGAGCUUCCAGACGCUCCGCCCCACGUCGCAUGCGCCCCGGGAAAGCGUGGGGCGGAGCUUCCG
GAGGCCCCGCCCUGCUG
>hsa-mir-3180-4 MI0016408
(SEQ ID NO: 1661)
GCUCCGCCCCACGUCGCAUGCGCCCCGGGAACGCGUGGGGCGGAGCUUCCGGAGGCCCCGCUCUGCUGCCGACCCUG
UGGAGCGGAGGGUGAAGCCUCCGGAUGCCAGUCCCUCAUCGCUGGCCUGGUCGCGCUGUGGCGAAGGGGGCGGAGC
>hsa-mir-3180-5 MI0016409
(SEQ ID NO: 1662)
GCUCCGCCCCACGUCGCAUGCGCCCCGGGAACGCGUGGGGCGGAGCUUCCGGAGGCCCCGCCCUGCUGCCGACCCUG
UGGAGCGGAGGGUGAAGCCUCCGGAUGCCAGUCCCUCAUCGCUGGCCCGGUCGCGCUGUGGCGAAGGGGGCGGAGC
>hsa-mir-3181 MI0014223
(SEQ ID NO: 1663)
CGGCGACCAUCGGGCCCUCGGCGCCGGCCCGUUAGUUGCCCGGGCCCGAGCCGGCCGGGCCCGCGGGUUGCCG
>hsa-mir-3182 MI0014224
(SEQ ID NO: 1664)
GCUGCUUCUGUAGUGUAGUCCGUGCAUCCGCCCUUCGAUGCUUGGGUUGGAUCAUAGAGCAGU
>hsa-mir-3183 MI0014225
(SEQ ID NO: 1665)
CUCUGCCCUGCCUCUCUCGGAGUCGCUCGGAGCAGUCACGUUGACGGAAUCCUCCGGCGCCUCCUCGAGGGAGGAGA
GGCAGGG
>hsa-mir-3184 MI0014226
(SEQ ID NO: 1666)
AAGCAAGACUGAGGGGCCUCAGACCGAGCUUUUGGAAAAUAGAAAAGUCUCGCUCUCUGCCCCUCAGCCUAACUU
>hsa-mir-3185 MI0014227
(SEQ ID NO: 1667)
GAAUGGAAGAAGAAGGCGGUCGGUCUGCGGGAGCCAGGCCGCAGAGCCAUCCGCCUUCUGUCCAUGUC
>hsa-mir-3186 MI0014229
(SEQ ID NO: 1668)
AGCCUGCGGUUCCAACAGGCGUCUGUCUACGUGGCUUCAACCAAGUUCAAAGUCACGCGGAGAGAUGGCUUUGGAAC
CAGGGGCU
>hsa-mir-3187 MI0014231
(SEQ ID NO: 1669)
GCUGGCCCUGGGCAGCGUGUGGCUGAAGGUCACCAUGUUCUCCUUGGCCAUGGGGCUGCGCGGGGCCAGC
>hsa-mir-3188 MI0014232
(SEQ ID NO: 1670)
GGCGCCUCCUGCUCUGCUGUGCCGCCAGGGCCUCCCCUAGCGCGCCUUCUGGAGAGGCUUUGUGCGGAUACGGGGCU
GGAGGCCU
>hsa-mir-3189 MI0014233
(SEQ ID NO: 1671)
GCCUCAGUUGCCCCAUCUGUGCCCUGGGUAGGAAUAUCCUGGAUCCCCUUGGGUCUGAUGGGGUAGCCGAUGC
>hsa-mir-3190 MI0014235
(SEQ ID NO: 1672)
CUGGGGUCACCUGUCUGGCCAGCUACGUCCCCACGGCCCUUGUCAGUGUGGAAGGUAGACGGCCAGAGAGGUGACCC
CGG
>hsa-mir-3191 MI0014236
(SEQ ID NO: 1673)
GGGGUCACCUCUCUGGCCGUCUACCUUCCACACUGACAAGGGCCGUGGGGACGUAGCUGGCCAGACAGGUGACCCC
>hsa-mir-3192 MI0014237
(SEQ ID NO: 1674)
GGAAGGGAUUCUGGGAGGUUGUAGCAGUGGAAAAAGUUCUUUUCUUCCUCUGAUCGCCCUCUCAGCUCUUUCCUUCU
>hsa-mir-3193 MI0014238
(SEQ ID NO: 1675)
UCCUGCGUAGGAUCUGAGGAGUGGACGAGUCUCAUUACCCAGCUCCUGAGCAGGA
>hsa-mir-3194 MI0014239
(SEQ ID NO: 1676)
AGGUGGCAGGGCCAGCCACCAGGAGGGCUGCGUGCCACCCGGGCAGCUCUGCUGCUCACUGGCAGUGUCACCU
>hsa-mir-3195 MI0014240
(SEQ ID NO: 1677)
CCGCAGCCGCCGCGCCGGGCCCGGGUUGGCCGCUGACCCCCGCGGGGCCCCCGGCGGCCGGGGCGGGGGCGGGGGCU
GCCCCGG
>hsa-mir-3196 MI0014241
(SEQ ID NO: 1678)
GGGUGGGGGCGGGGCGGCAGGGGCCUCCCCCAGUGCCAGGCCCCAUUCUGCUUCUCUCCCAGCU
>hsa-mir-3197 MI0014245
(SEQ ID NO: 1679)
GGCGAGGGGAGGCGCAGGCUCGGAAAGGCGCGCGAGGCUCCAGGCUCCUUCCCGAUCCACCGCUCUCCUCGCU
>hsa-mir-3198-1 MI0014246
(SEQ ID NO: 1680)
GACUGUGCUCUCACUGUUCACCCAGCACUAGCAGUACCAGACGGUUCUGUGGAGUCCUGGGGAAUGGAGAGAGCACA
GUC
>hsa-mir-3198-2 MI0017335
(SEQ ID NO: 1681)
GACUCUGCUCUCACUGUUCACCCAGCACUAGCAGUACCAGAUGGUUCUGUGGAGUCCUGGGGAAUGGAGAGAGCACA
GUC
>hsa-mir-3199-1 MI0014247
(SEQ ID NO: 1682)
GGUGACUCCAGGGACUGCCUUAGGAGAAAGUUUCUGGAAGUUCUGACAUUCCAGAAACUUUCUCCUAAGGCAGUCCC
UGGGAGUCACU
>hsa-mir-3199-2 MI0014248
(SEQ ID NO: 1683)
GUGACUCCCAGGGACUGCCUUAGGAGAAAGUUUCUGGAAUGUCAGAACUUCCAGAAACUUUCUCCUAAGGCAGUCCC
UGGAGUCAC
>hsa-mir-3200 MI0014249
(SEQ ID NO: 1684)
GGUGGUCGAGGGAAUCUGAGAAGGCGCACAAGGUUUGUGUCCAAUACAGUCCACACCUUGCGCUACUCAGGUCUGCU
CGUGCCCU
>hsa-mir-3201 MI0014250
(SEQ ID NO: 1685)
GGGAUAUGAAGAAAAAUAAGAGGCUAGGAUUGCCUCUUAUUUUUACAUGCCC
>hsa-mir-3202-1 MI0014252
(SEQ ID NO: 1686)
UAUUAAUAUGGAAGGGAGAAGAGCUUUAAUGAUUGGAGUCAUUUUCAGAGCAUUAAAGCUCUUCUCCCUUCCAUAUU
AAUG
>hsa-mir-3202-2 MI0014253
(SEQ ID NO: 1687)
AUUAAUAUGGAAGGGAGAAGAGCUUUAAUGCUCUGAAAAUGACUCCAAUCAUUAAAGCUCUUCUCCCUUCCAUAUUA
AU
>hsa-mir-3529 MI0017351
(SEQ ID NO: 1688)
GGCACCAUUAGGUAGACUGGGAUUUGUUGUUGAGCGCAGUAAGACAACAACAAAAUCACUAGUCUUCCAGAUGGGGCC
>hsa-mir-3545 MI0017343
(SEQ ID NO: 1689)
GCGCCCGCCGGGUCUAGUGGUCCUAAACAUUUCACAAUUGCGCUACAGAACUGUUGAACUGUUAAGAACCACUGGAC
CCAGCGCGC
>hsa-mir-3591 MI0017383
(SEQ ID NO: 1690)
CAGUAGCUAUUUAGUGUGAUAAUGGCGUUUGAUAGUUUAGACACAAACACCAUUGUCACACUCCACAGCUCUG
>hsa-mir-3605 MI0015995
(SEQ ID NO: 1691)
ACUUUAUACGUGUAAUUGUGAUGAGGAUGGAUAGCAAGGAAGCCGCUCCCACCUGACCCUCACGGCCUCCGUGUUAC
CUGUCCUCUAGGUGGGACGCUCG
>hsa-mir-3606 MI0015996
(SEQ ID NO: 1692)
UUGUUGCUAUCUAGGUUAGUGAAGGCUAUUUUAAUUUUUUUAAAAUUUCUUUCACUACUUAGG
>hsa-mir-3607 MI0015997
(SEQ ID NO: 1693)
AAGGUUGCGGUGCAUGUGAUGAAGCAAAUCAGUAUGAAUGAAUUCAUGAUACUGUAAACGCUUUCUGAUGUACUACU
CA
>hsa-mir-3609 MI0015999
(SEQ ID NO: 1694)
GUAACAGUAACUUUUAUUCUCAUUUUCCUUUUCUCUACCUUGUAGAGAAGCAAAGUGAUGAGUAAUACUGGCUGGAG
CCC
>hsa-mir-3610 MI0016000
(SEQ ID NO: 1695)
AAGAGCCGCGGCGUAACGGCAGCCAUCUUGUUUGUUUGAGUGAAUCGGAAAGGAGGCGCCGGCUGUGGCGGCG
>hsa-mir-3611 MI0016001
(SEQ ID NO: 1696)
AGCAGGUCUAAUAAGAAUUUCUUUUUCUUCACAAUUAUGAAAGAAAAGAAAUUGUGAAGAAAGAAAUUCUUACUAGU
UUUGCU
>hsa-mir-3612 MI0016002
(SEQ ID NO: 1697)
GGGACUGGGGAUGAGGAGGCAUCUUGAGAAAUGGAAGGAAUGGGAUCUACUUCCAGUUCACUAGAGGCGUCCUGACA
CCCCUAGCUC
>hsa-mir-3613 MI0016003
(SEQ ID NO: 1698)
UGGUUGGGUUUGGAUUGUUGUACUUUUUUUUUUGUUCGUUGCAUUUUUAGGAACAAAAAAAAAAGCCCAACCCUUCA
CACCACUUCA
>hsa-mir-3614 MI0016004
(SEQ ID NO: 1699)
GGUUCUGUCUUGGGCCACUUGGAUCUGAAGGCUGCCCCUUUGCUCUCUGGGGUAGCCUUCAGAUCUUGGUGUUUUGA
AUUCUUACU
>hsa-mir-3615 MI0016005
(SEQ ID NO: 1700)
GACUCUGGGACGCUCAGACGCCGCGCGGGGCGGGGAUUGGUCUGUGGUCCUCUCUCGGCUCCUCGCGGCUCGCGGCG
GCCGACGGUU
>hsa-mir-3616 MI0016006
(SEQ ID NO: 1701)
UGUCACUCCGCCAGCAUCAUGAAGUGCACUCAUGAUAUGUUUGCCCCAUCAGCGUGUCACGAGGGCAUUUCAUGAUG
CAGGCGGGGUUGGCA
>hsa-mir-3617 MI0016007
(SEQ ID NO: 1702)
AGGUCAUAGAAAGACAUAGUUGCAAGAUGGGAUUAGAAACCAUAUGUCUCAUCAGCACCCUAUGUCCUUUCUCUGCC
CU
>hsa-mir-3618 MI0016008
(SEQ ID NO: 1703)
UAAGCUGAGUGCAUUGUGAUUUCCAAUAAUUGAGGCAGUGGUUCUAAAAGCUGUCUACAUUAAUGAAAAGAGCAAUG
UGGCCAGCUUG
>hsa-mir-3619 MI0016009
(SEQ ID NO: 1704)
ACGGCAUCUUUGCACUCAGCAGGCAGGCUGGUGCAGCCCGUGGUGGGGGACCAUCCUGCCUGCUGUGGGGUAAGGAC
GGCUGU
>hsa-mir-3620 MI0016011
(SEQ ID NO: 1705)
GUGAGGUGGGGGCCAGCAGGGAGUGGGCUGGGCUGGGCUGGGCCAAGGUACAAGGCCUCACCCUGCAUCCCGCACCC
AG
>hsa-mir-3621 MI0016012
(SEQ ID NO: 1706)
GUGAGCUGCUGGGGACGCGGGUCGGGGUCUGCAGGGCGGUGCGGCAGCCGCCACCUGACGCCGCGCCUUUGUCUGUG
UCCCACAG
>hsa-mir-3622a MI0016013
(SEQ ID NO: 1707)
AAUAGAGGGUGCACAGGCACGGGAGCUCAGGUGAGGCAGGGAGCUGAGCUCACCUGACCUCCCAUGCCUGUGCACCC
UCUAUU
>hsa-mir-3622b MI0016014
(SEQ ID NO: 1708)
AGUGAUAUAAUAGAGGGUGCACAGGCAUGGGAGGUCAGGUGAGCUCAGCUCCCUGCCUCACCUGAGCUCCCGUGCCU
GUGCACCCUCUAUUGGCU
>hsa-mir-3646 MI0016046
(SEQ ID NO: 1709)
UUCAGUAGGUUGGGUUCAUUUCAUUUUCAUGACAACCCUAUAUGGGAAAAUGUUGUGAAAAUGAAAUGAGCCCAGCC
CAUUGAA
>hsa-mir-3648 MI0016048
(SEQ ID NO: 1710)
CGCGACUGCGGCGGCGGUGGUGGGGGGAGCCGCGGGGAUCGCCGAGGGCCGGUCGGCCGCCCCGGGUGCCGCGCGGU
GCCGCCGGCGGCGGUGAGGCCCCGCGCGUGUGUCCCGGCUGCGGUCGGCCGCGCUCGAGGGGUCCCCGUGGCGUCCC
CUUCCCCGCCGGCCGCCUUUCUCGCG
>hsa-mir-3649 MI0016049
(SEQ ID NO: 1711)
GCUUGGAACAGGCACCUGUGUGUGCCCAAGUGUUUCUAGCAAACACAGGGACCUGAGUGUCUAAGC
>hsa-mir-3650 MI0016050
(SEQ ID NO: 1712)
UCAAGGUGUGUCUGUAGAGUCCUGACUGCGUGCCAGGGGCUCUGUCUGGCACAUUUCUGA
>hsa-mir-3651 MI0016051
(SEQ ID NO: 1713)
GAUUCGAUGGGCCAUAGCAAUCCUGUGAUUUAUGCAUGGAGGCUGCUUCUCCUCAGCAGCUGCCAUAGCCCGGUCGC
UGGUACAUGAUUC
>hsa-mir-3652 MI0016052
(SEQ ID NO: 1714)
CGGCUGGAGGUGUGAGGAUCCGAACCCAGGGGUGGGGGGUGGAGGCGGCUCCUGCGAUCGAAGGGGACUUGAGACUC
ACCGGCCGCACGCCAUGAGGGCCCUGUGGGUGCUGGGCCUCUGCUGCGUCCUGC
>hsa-mir-3653 MI0016053
(SEQ ID NO: 1715)
UCCCUGGGGACCCCUGGCAGCCCCUCCUGAUGAUUCUUCUUCCUGAGCACGCUCAUGAUGAGCAAACUGAGCCUCUA
AGAAGUUGACUGAAGGGGCUGCUUCCCCAAGGA
>hsa-mir-3654 MI0016054
(SEQ ID NO: 1716)
UUCAUGAGCUGCAAUCUCAUCACUGGAAUGUUCCAGCGACUGGACAAGCUGAGGAA
>hsa-mir-3655 MI0016055
(SEQ ID NO: 1717)
GCUUGUCGCUGCGGUGUUGCUGUUGGAGACUCGAUUGUUGGUGACAGCGAAAGAACGAUAACAAAAUGCCGGAGCGA
GAUAGU
>hsa-mir-3656 MI0016056
(SEQ ID NO: 1718)
CUUUCGGCCAGCGGGACGGCAUCCGAGGUGGGCUAGGCUCGGGCCCGUGGCGGGUGCGGGGGUGGGAGG
>hsa-mir-3657 MI0016057
(SEQ ID NO: 1719)
UGUGUCCCAUAAUUAAAUAAUGAAAUCUGAAAUCACCAAUAAUGGGACACUAAUGUGAUUAAUGUUGUUGUGUCCCA
UUAUUGGUGAUUUCAGAUUUCAUAUAUGAUUAAGGACAUA
>hsa-mir-3658 MI0016058
(SEQ ID NO: 1720)
UAUUUAAGAAAACACCAUGGAGAUGAAAUGCCUUUGAUUUUUUUUUUCUUUUUGUA
>hsa-mir-3659 MI0016060
(SEQ ID NO: 1721)
UCUACAAGCAGAUACAAGGAUGCCCUUGUACACAACACACGUGCUGCUUGUAUAGACAUGAGUGUUGUCUACGAGGG
CAUCCUUGUGUCUGUGUGUGUG
>hsa-mir-3660 MI0016061
(SEQ ID NO: 1722)
GAAAGAAGAACUGGACAAAAUUAAAAUGCUCUUCUGUCAUUGUAAUAGUUCAUAUGGGCACUGACAGGAGAGCAUUU
UGACUUUGUCAAGUGUGUCUGCU
>hsa-mir-3661 MI0016062
(SEQ ID NO: 1723)
CACCUUCUCGCAGAGGCUCUUGACCUGGGACUCGGACAGCUGCUUGCACUCGUUCAGCUGCUCGAUCCACUGGUCCA
GCUCCUUGGUGAACACCUU
>hsa-mir-3662 MI0016063
(SEQ ID NO: 1724)
UGUGUUUUCCUCAACGCUCACAGUUACACUUCUUACUCUCAAUCCAUUCAUAUUGAAAAUGAUGAGUAGUGACUGAU
GAAGCACAAAUCAGCCAA
>hsa-mir-3663 MI0016064
(SEQ ID NO: 1725)
CCCGGGACCUUGGUCCAGGCGCUGGUCUGCGUGGUGCUCGGGUGGAUAAGUCUGAUCUGAGCACCACACAGGCCGGG
CGCCGGGACCAAGGGGGCUC
>hsa-mir-3664 MI0016065
(SEQ ID NO: 1726)
CUGUAAACUUGAAGGUAGGGAACUCUGUCUUCACUCAUGAGUACCUUCCAACACGAGCUCUCAGGAGUAAAGACAGA
GUUCCCUACCUUCAAUGUGGAU
>hsa-mir-3665 MI0016066
(SEQ ID NO: 1727)
GCGGGCGGCGGCGGCGGCAGCAGCAGCAGGUGCGGGGCGGCGGCCGCGCUGGCCGCUCGACUCCGCAGCUGCUCGUU
CUGCUUCUCCAGCUUGCGCACCAGCUCC
>hsa-mir-3666 MI0016067
(SEQ ID NO: 1728)
AGUAAGGUCCGUCAGUUGUAAUGAGACCCAGUGCAAGUGUAGAUGCCGACUCCGUGGCAGAGUUCAGCGUUUCACAC
UGCCUGGUCUCUGUCACUCUAUUGAAUUAGAUUG
>hsa-mir-3667 MI0016068
(SEQ ID NO: 1729)
UGAGGAUGAAAGACCCAUUGAGGAGAAGGUUCUGCUGGCUGAGAACCUUCCUCUCCAUGGGUCUUUCAUCCUCA
>hsa-mir-3668 MI0016069
(SEQ ID NO: 1730)
AUAUAUGAAAUGUAGAGAUUGAUCAAAAUAGUUUCUAUCAAAAUAGUUUUGAUCAAUCUCUGCAAUUUUAUAUAU
>hsa-mir-3669 MI0016070
(SEQ ID NO: 1731)
AUAUAUAUAUACGGAAUAUAUAUACGGAAUAUAUAUAUACGGAAUAUAUAUAUACGGAAUAUGUAUACGGAAUAUAU
AUAU
>hsa-mir-3670-1 MI0016071
(SEQ ID NO: 1732)
UCUAGACUGGUAUAGCUGCUUUUGGAGCCUCACCUGCUGAGAGCUCACAGCUGUCCUUCUCUAGA
>hsa-mir-3670-2 MI0019112
(SEQ ID NO: 1733)
UCUAGACUGGUAUAGCUGCUUUUGGAGCCUCACCUGCUGAGAGCUCACAGCUGUCCUUCUCUAGA
>hsa-mir-3671 MI0016072
(SEQ ID NO: 1734)
AUGUUAUUGCUGCUGCUGUCACAUUUACAUGAAAAUAAAAUGUAAAUUAUUUUAUUUCUAUCAAAUAAGGACUAGUC
UGCAGUGAUAU
>hsa-mir-3672 MI0016073
(SEQ ID NO: 1735)
UCUUUGUGAUUACCAUGAGACUCAUGUAAAACAUCUUAGACUAUUACAAGAUGUUUUAUGAGUCUCAUGAUAAUCAC
AAAGA
>hsa-mir-3673 MI0016074
(SEQ ID NO: 1736)
AUAUAUAUAUAUGGAAUGUAUAUACGGAAUAUAUAUAUAUAUGGAAUGUAUAUACGGAAUAUAUAUAUAUAUGGAAU
GUAUAUACGGAAUAUAUAUAUAUAU
>hsa-mir-3674 MI0016075
(SEQ ID NO: 1737)
ACAUCACUAUUGUAGAACCUAAGAUUGGCCGUUUGAGAUGUCCUUUCAAGUUUUUGCAUUUCUGAUGU
>hsa-mir-3675 MI0016076
(SEQ ID NO: 1738)
GGAUGAUAAGUUAUGGGGCUUCUGUAGAGAUUUCUAUGAGAACAUCUCUAAGGAACUCCCCCAAACUGAAUUC
>hsa-mir-3676 MI0016077
(SEQ ID NO: 1739)
UUGGUUAAAGCGCCUGUCUAGUAAACAGGAGAUCCUGGGUUCGAAUCCCAGCGGUGCCUCCGUGUUUCCCCCACGCU
UUUGCCAA
>hsa-mir-3677 MI0016078
(SEQ ID NO: 1740)
GGCAGUGGCCAGAGCCCUGCAGUGCUGGGCAUGGGCUUCUCGUGGGCUCUGGCCACGGCC
>hsa-mir-3678 MI0016079
(SEQ ID NO: 1741)
GAAUCCGGUCCGUACAAACUCUGCUGUGUUGAAUGAUUGGUGAGUUUGUUUGCUCAUUGAUUGAAUCACUGCAGAGU
UUGUACGGACCGGAUUC
>hsa-mir-3679 MI0016080
(SEQ ID NO: 1742)
CGUGGUGAGGAUAUGGCAGGGAAGGGGAGUUUCCCUCUAUUCCCUUCCCCCCAGUAAUCUUCAUCAUG
>hsa-mir-3680-1 MI0016081
(SEQ ID NO: 1743)
AAAUUUAAGGAGGGACUCACUCACAGGAUUGUGCAAAUGCAAAGUUGGCUUUUGCAUGACCCUGGGAGUAGGUGCCU
CCUUAAAUUU
>hsa-mir-3680-2 MI0019113
(SEQ ID NO: 1744)
AAAUUUAAGGAGGGACUCACUCACAGGAUUGUGCAAAUGCAAAGUUGGCUUUUGCAUGACCCUGGGAGUAGGUGCCU
CCUUAAAUUU
>hsa-mir-3681 MI0016082
(SEQ ID NO: 1745)
ACUUCCAGUAGUGGAUGAUGCACUCUGUGCAGGGCCAACUGUGCACACAGUGCUUCAUCCACUACUGGAAGU
>hsa-mir-3682 MI0016083
(SEQ ID NO: 1746)
UAAGUUAUAUAUGUCUACUUCUACCUGUGUUAUCAUAAUAAAGGUGUCAUGAUGAUACAGGUGGAGGUAGAAAUAUA
UAACUUA
>hsa-mir-3683 MI0016084
(SEQ ID NO: 1747)
GGGUGUACACCCCCUGCGACAUUGGAAGUAGUAUCAUCUCUCCCUUGGAUGCUACGAACAAUAUCACAGAAGGUGUA
CACCC
>hsa-mir-3684 MI0016085
(SEQ ID NO: 1748)
AAUCUAAAGGACCUGUACUAGGUUUAACAUGUUGAGCAUUACUCAUGUUAGACCUAGUACACGUCCUUUAGAUU
>hsa-mir-3685 MI0016086
(SEQ ID NO: 1749)
GUACAUUUCCUACCCUACCUGAAGACUUGAGAUUAUAGUCUUUGGGGGGAUGGGCAAAGUAC
>hsa-mir-3686 MI0016087
(SEQ ID NO: 1750)
CUCACCUCAUUCAUUUACCUUCUCUUACAGAUCACUUUUCUGCACUGGACAGUGAUCUGUAAGAGAAAGUAAAUGAA
AGAGGUGAG
>hsa-mir-3687 MI0016088
(SEQ ID NO: 1751)
CGCGCGUGCGCCCGAGCGCGGCCCGGUGGUCCCUCCCGGACAGGCGUUCGUGCGACGUGUG
>hsa-mir-3688-1 MI0016089
(SEQ ID NO: 1752)
UCUUCACUUUCAAGAGUGGCAAAGUCUUUCCAUAUGUAUGUAUGUAUGUCUGUUACACAUAUGGAAAGACUUUGCCA
CUCUUUAAAGUGAAGA
>hsa-mir-3688-2 MI0017447
(SEQ ID NO: 1753)
UCACUUUAAAGAGUGGCAAAGUCUUUCCAUAUGUGUAACAGACAUACAUACAUACAUAUGGAAAGACUUUGCCACUC
UUGAAAGUGA
>hsa-mir-3689a MI0016090
(SEQ ID NO: 1754)
CCUGGGAGGUGUGAUAUCAUGGUUCCUGGGAGGUGUGAUCCUGUGCUUCCUGGGAGGUGUGAUAUCGUGGUUCCUGGG
>hsa-mir-3689b MI0016411
(SEQ ID NO: 1755)
GAUCCUGUGCUCCCUGGGGGGUCUGAUCCUGUGCUUCCUGGGAGGUGUGAUAUCAUGGUUCCUGGGAGGUGUGAUCC
CGUGCUUCCUGGGAGGUGUGAUAUUGUGGUUCCUGGGAGGUGUGAUCCCGUGCUCCCUGGGAGGUGUGAUC
>hsa-mir-3689c MI0016832
(SEQ ID NO: 1756)
GGGAGGUGUGAUAUCGUGGUUCCUGGGAGGUGUGAUAUCGUGGUUCCUGGGAGGUGUGAUAUUGUGGUUCCU
>hsa-mir-3689d-1 MI0016834
(SEQ ID NO: 1757)
UGGGAGGUGUGAUCUCACACUCGCUGGGAGGUGUGCUAUCGUCUUCCCCGGGAGGUGUGAUCCUGUUCUUCCUG
>hsa-mir-3689d-2 MI0016835
(SEQ ID NO: 1758)
ACUGGGAGGUGUGAUCUCACACUCGCUGGGAGGUGUGCUAUCGUCUUCCCUGGGAGGUGUGAUCCUGUUCUUCCUGA
GCG
>hsa-mir-3689e MI0016836
(SEQ ID NO: 1759)
GGGAGGUGUGAUAUCAUGGUUCCUGGGAGGUAUGAUAUCGUGGUUCCUGGGAGGUGUGAUCCCGUGCUCCCU
>hsa-mir-3689f MI0016837
(SEQ ID NO: 1760)
AGGUGUGAUAUCGUGCUUCCUGGGACGUGUGAUGCUGUGCUUCCUGGGAGGUGUGAUCCCACACUC
>hsa-mir-3690 MI0016091
(SEQ ID NO: 1761)
CCCAUCUCCACCUGGACCCAGCGUAGACAAAGAGGUGUUUCUACUCCAUAUCUACCUGGACCCAGUGUAGAUGGG
>hsa-mir-3691 MI0016092
(SEQ ID NO: 1762)
UUGAGGCACUGGGUAGUGGAUGAUGGAGACUCGGUACCCACUGCUGAGGGUGGGGACCAAGUCUGCGUCAUCCUCUC
CUCAGUGCCUCAA
>hsa-mir-3692 MI0016093
(SEQ ID NO: 1763)
CCAUUCCUGCUGGUCAGGAGUGGAUACUGGAGCAAUAGAUACAGUUCCACACUGACACUGCAGAAGUGG
>hsa-mir-3713 MI0016134
(SEQ ID NO: 1764)
GGUAUCCGUUUGGGGAUGGUUUCACUAUCCCCAGAUGGAUACCAA
>hsa-mir-3714 MI0016135
(SEQ ID NO: 1765)
GAAGGCAGCAGUGCUCCCCUGUGACGUGCUCCAUCACCGGGCAGGGAAGACACCGCUGCCACCUC
>hsa-mir-3907 MI0016410
(SEQ ID NO: 1766)
GGGUUGGAAAGCUGUAGGUGUGGAGGGGCAUGGAUACGGGGGCCAUGAGGGUGGGGUCCAGGCUGGACCAGGCCUGC
CCUGAGUCCCCCAGCAGGUGCUCCAGGCUGGCUCACACCCUCUGCCUCUCUCUCUUCCUUCCUGGCCCCAACCC
>hsa-mir-3908 MI0016412
(SEQ ID NO: 1767)
GCCUGAGCAAUGUAGGUAGACUGUUUCUAAAAAAAUAAAAAGUUAAAAAAAUUUAUGUUAACGUGUAAUGUGUUUAC
UAAUUUUUUUUUUUUUUUUUGGAGACAGAGUCUCCCUCUGUCGCCAGGC
>hsa-mir-3909 MI0016413
(SEQ ID NO: 1768)
GGUAUGCUGUUGCGCUGUCCUUCCUCUGGGGAGCAGGCUCCGGGGGACAGGGAAAAGCACACAAGGAACUUGUCCUC
UAGGGCCUGCAGUCUCAUGGGAGAGUGACAUGCACCAGGACC
>hsa-mir-3910-1 MI0016414
(SEQ ID NO: 1769)
CUUUUGCUGUCAGUUUUUCUGUUGCUUGUCUUGGUUUUAUGCCUUUUAUAUCAAGGCACAUAAAAGGCAUAAAACCA
AGACAAGCAACAAAAAAAGGAUUGAUCACAGAAG
>hsa-mir-3910-2 MI0016431
(SEQ ID NO: 1770)
UUUUUUUGUUGCUUGUCUUGGUUUUAUGCCUUUUAUGUGCCUUGAUAUAAAAGGCAUAAAACCAAGACAAGCAACAG
AAAAA
>hsa-mir-3911 MI0016415
(SEQ ID NO: 1771)
GGGUGAGGAUGUGUGUGGAUCCUGGAGGAGGCAGAGAAGACAGUGAGCUUGCCAGUUCUGGUUUCCAACACUUCCUU
UCCUGCGCUUCUCGAUUCCCAGAUCUGCACCC
>hsa-mir-3912 MI0016416
(SEQ ID NO: 1772)
AGAGAGGAAUGAACAGUUAAAUUAUAACAUGUCCAUAUUAUGGGUUAGUUGUGGACACAUACUAACGCAUAAUAUGG
ACAUGUUAUAAUUUAACUGUUCCUUUCU
>hsa-mir-3913-1 MI0016417
(SEQ ID NO: 1773)
UUGUUUAUAAUAAACUGAAAUAUUUGGGACUGAUCUUGAUGUCUGCCAAAACCUUGGCAGACAUCAAGAUCAGUCCC
AAAUAUUUCAGUUUAUUAUAGACAG
>hsa-mir-3913-2 MI0016418
(SEQ ID NO: 1774)
UGUCUAUAAUAAACUGAAAUAUUUGGGACUGAUCUUGAUGUCUGCCAAGGUUUUGGCAGACAUCAAGAUCAGUCCCA
AAUAUUUCAGUUUAUUAUAAACA
>hsa-mir-3914-1 MI0016419
(SEQ ID NO: 1775)
UGGACUUCAGAUUUAACUUCUCAUUUUCUGGUUCCUUCUAAUGAGUAUGCUUAACUUGGUAGAAGGAACCAGAAAAU
GAGAAGUUGAGUAGGAACUCUA
>hsa-mir-3914-2 MI0016421
(SEQ ID NO: 1776)
GAGUUCCUACUCAACUUCUCAUUUUCUGGUUCCUUCUACCAAGUUAAGCAUACUCAUUAGAAGGAACCAGAAAAUGA
GAAGUUAAAUCUGAAGUC
>hsa-mir-3915 MI0016420
(SEQ ID NO: 1777)
CAAGUUGGCACUGUAGAAUAUUGAGGAAAAGAUGGUCUUAUUGCAAAGAUUUUCAAUAAGACCAUCCUUUCCUCAAU
AUUCUGUGGUGUCAUCUUUG
>hsa-mir-3916 MI0016422
(SEQ ID NO: 1778)
AUCCCAGAGAAGAAGGAAGAAGAGGAAGAAAUGGCUGGUUCUCAGGUGAAUGUGUCUGGGUUCAGGGGAUGUGUCUC
CUCUUUUCUUCUGGGAU
>hsa-mir-3917 MI0016423
(SEQ ID NO: 1779)
GGCGCUUUUGUGCGCGCCCGGGUCUGUUGGUGCUCAGAGUGUGGUCAGGCGGCUCGGACUGAGCAGGUGGGUGCGGG
GCUCGGAGGAGGCGGC
>hsa-mir-3918 MI0016424
(SEQ ID NO: 1780)
AGGCGGUUAAGCCAUGGGACAGGGCCGCAGAUGGAGACUGCUCAAGGUCAAAGGGGUCUCCAGCUGGGACCCUGCAC
CUGGUUCGUAGCCCCU
>hsa-mir-3919 MI0016425
(SEQ ID NO: 1781)
CCUGAGCACCAUUUACUGAGUCCUUUGUUCUCUACUAGUUUGUAGUAGUUCGUAGCAGAGAACAAAGGACUCAGUAA
AUGGUGCUCAGG
>hsa-mir-3920 MI0016427
(SEQ ID NO: 1782)
ACUGAGUGAGGGAGUCAGAGAGUUAAGAGAAUUAGUACAGGUGAGAUUGUACUGAUUAUCUUAACUCUCUGACCCCC
UCACUCAGU
>hsa-mir-3921 MI0016428
(SEQ ID NO: 1783)
CCUAGCCCAGUACAAGGCAUAUGGUACUCAAGAGACUUAGAAAUCCCUAAGUCUCUGAGUACCAUAUGCCUUGUACU
GGGCUAGG
>hsa-mir-3922 MI0016429
(SEQ ID NO: 1784)
GGAAGAGUCAAGUCAAGGCCAGAGGUCCCACAGCAGGGCUGGAAAGCACACCUGUGGGACUUCUGGCCUUGACUUGA
CUCUUUC
>hsa-mir-3923 MI0016430
(SEQ ID NO: 1785)
GGUAGAGUGAGCUCUAAUCCAAUAUUACUAGCUUCUUUAUAAGAAGAGGAAACUAGUAAUGUUGGAUUAGGGCUCAC
UCUACU
>hsa-mir-3924 MI0016432
(SEQ ID NO: 1786)
UAAAUGAAAAAGUAGUAGUCAAAUAUGCAGAUCUAUGUCAUAUAUACAGAUAUGUAUAUGUGACUGCUACUUUUUUG
UUUA
>hsa-mir-3925 MI0016433
(SEQ ID NO: 1787)
GUGGGAAUAGCAAGAGAACUGAAAGUGGAGCCUGUCACAUCUCCAGACUCCAGUUUUAGUUCUCUUGCUAUUUCCAC
>hsa-mir-3926-1 MI0016434
(SEQ ID NO: 1788)
AAAAUGGAGCUGGCCAAAAAGCAGGCAGAGACUUUAAAAGCGUCUCUGCCUGCUUUUUGGCCAGCUCCGUUUU
>hsa-mir-3926-2 MI0016437
(SEQ ID NO: 1789)
GGAGCUGGCCAAAAAGCAGGCAGAGACGCUUUUAAAGUCUCUGCCUGCUUUUUGGCCAGCUCC
>hsa-mir-3927 MI0016435
(SEQ ID NO: 1790)
UGCCAAUGCCUAUCACAUAUCUGCCUGUCCUAUGACAAACAUGGCAGGUAGAUAUUUGAUAGGCAUUGGCA
>hsa-mir-3928 MI0016438
(SEQ ID NO: 1791)
GCUGAAGCUCUAAGGUUCCGCCUGCGGGCAGGAAGCGGAGGAACCUUGGAGCUUCGGC
>hsa-mir-3929 MI0016439
(SEQ ID NO: 1792)
AGUGGCUCACACCAGUAAUCCCAGCACUUUGGGAGGCUGAUGUGAGUAGACCACU
>hsa-mir-3934 MI0016590
(SEQ ID NO: 1793)
CACAGCCCUUCCUGUCCCCAGUUUUCAGGUGUGGAAACUGAGGCAGGAGGCAGUGAAGUAACUUGCUCAGGUUGCAC
AGCUGGGAAGUGGAGCAGGGAUUUGAAUCC
>hsa-mir-3935 MI0016591
(SEQ ID NO: 1794)
GGAUGUGUUCCUGUCCCAGAAGGAGCUGAUGGUUGUAUCUAUGAAGGUAAGCAUUUUUGUAGAUACGAGCACCAGCC
ACCCUAAGCAAAGGCAGAGAAUGCUUA
>hsa-mir-3936 MI0016592
(SEQ ID NO: 1795)
AUGAUUCAGAGCAUCUGUCCAGUGUCUGCUGUAGAUCCCUCAAAUCCGUGUUUGGACGCUUCUGGUAAGGGGUGUAU
GGCAGAUGCACCCGACAGAUGCACUUGGCAGCA
>hsa-mir-3937 MI0016593
(SEQ ID NO: 1796)
AGAAGAAUGCCCAACCAGCCCUCAGUUGCUACAGUUCCCUGUUGUUUCAGCUCGACAACAACAGGCGGCUGUAGCAA
UGGGGGGCUGGAUGGGCAUCUCAAUGUGC
>hsa-mir-3938 MI0016594
(SEQ ID NO: 1797)
AGGAAUUUUUAACCCGAUCACUAGAUUAUCUACAAGGGAAUUUUUUUUUAAUUUAAAAAAUUCCCUUGUAGAUAACC
CGGUGGUCAGGUUGGAUGGCUCCAUG
>hsa-mir-3939 MI0016596
(SEQ ID NO: 1798)
CUGGCUUCCAAAGGCCUCUGUGUGUUCCUGUAUGUGGGCGUGCACGUACCUGUCACAUGUGUACGCGCAGACCACAG
GAUGUCCACACUGGCUUCCAAACACAUCU
>hsa-mir-3940 MI0016597
(SEQ ID NO: 1799)
GCUUAUCGAGGAAAAGAUCGAGGUGGGUUGGGGCGGGCUCUGGGGAUUUGGUCUCACAGCCCGGAUCCCAGCCCACU
UACCUUGGUUACUCUCCUUCCUUCU
>hsa-mir-3941 MI0016598
(SEQ ID NO: 1800)
GAGUCAGAAUUCUCAUCAGGCUGUGAUGCUCAGUUGUGUGUAGAUUGAAAGCCCUAAUUUUACACACAACUGAGGAU
CAUAGCCUGAUGGUUCCUUUUUGUUU
>hsa-mir-3942 MI0016599
(SEQ ID NO: 1801)
UCUUCAGUAUGACACCUCAAAGAAGCAAUACUGUUACCUGAAAUAGGCUGCGAAGAUAACAGUAUUUCAGAUAACAG
UAUUACAUCUUUGAAGUGUCAUAUUCACUGAC
>hsa-mir-3943 MI0016600
(SEQ ID NO: 1802)
CACACAGACGGCAGCUGCGGCCUAGCCCCCAGGCUUCACUUGGCGUGGACAACUUGCUAAGUAAAGUGGGGGGUGGG
CCACGGCUGGCUCCUACCUGGAC
>hsa-mir-3944 MI0016601
(SEQ ID NO: 1803)
UCCACCCAGCAGGCGCAGGUCCUGUGCAGCAGGCCAACCGAGAAGCGCCUGCGUCUCCCAUUUUCGGGCUGGCCUGC
UGCUCCGGACCUGUGCCUGAUCUUAAUGCUG
>hsa-mir-3945 MI0016602
(SEQ ID NO: 1804)
GAUGUUGAUGCACGUGACGGGGAGGGCAUAGGAGAGGGUUGAUAUAAAAUGCAAUUACAGCCUCUUAUGCUUUCCAA
AGUGGGGGAUGAUUCAAUGAU
>hsa-mir-3960 MI0016964
(SEQ ID NO: 1805)
GGCGCCCCGGCUCCCCGCGCCCCCGAUCGGGGCCGCCGCUAGUAGUGGCGGCGGCGGAGGCGGGGGCAGCGGCGGCG
GCGGCGGAGGCGCC
>hsa-mir-3972 MI0016990
(SEQ ID NO: 1806)
GCCCAUUUGCCUUGGCUUGGGGUGGCAGUCCUGUGGGAAUGAGAGAUGCCAAACUGGACCUGCCAGCCCCGUUCCAG
GGCACAGCAU
>hsa-mir-3973 MI0016991
(SEQ ID NO: 1807)
GCCCAGGGUAGCUCUCUGUAUUGCUUGUUACAUUUUAGGAUUGCUUGCCCCUUGCUCCAAUGGUGCAGGCAGAAGAA
AUGCAAACAAAGUACAGCAUUAGCCUUAGC
>hsa-mir-3974 MI0016992
(SEQ ID NO: 1808)
GUUCAGGGAAAAGGUCAUUGUAAGGUUAAUGCACCCAUAUUUUAAUAUCAAACUAUGACAAAUUUGACUACAGCCUU
UCCGUACCCCUGCCAAAAC
>hsa-mir-3975 MI0016993
(SEQ ID NO: 1809)
CAUGUAGGUGAGUGAUUGCUAUUUCAAAAGACUAGAGGUAGGAAAUGAGGCUAAUGCACUACUUCACAUG
>hsa-mir-3976 MI0016994
(SEQ ID NO: 1810)
UGAGGGAUAUAGAGAGCAGGAAGAUUAAUGUCAUAUUGGAGUUGGACUGCAGGGCUUCCUUUACACAAUAAAUAUUG
UAUGAAGUGCUGAUGUAACCUUUACUGCAGCAUGACAUGGGAUUUGGCUGUUUUUAUGGCUC
>hsa-mir-3977 MI0016995
(SEQ ID NO: 1811)
UUGUGCUUCAUCGUAAUUAACCUUAAGUGGUUCGGGUAAAUCACUUUAAUUUGUUAUGUGUUGGCAGAAU
>hsa-mir-3978 MI0016996
(SEQ ID NO: 1812)
UCAGUGGAAAGCAUGCAUCCAGGGUGUGGAGCCAAAAUUAGAAGGGCCAAAAUUCUACCUGGCCCACUACCACAGCA
ACCUUGGGCAUCGUUUUCUUUUGA
>hsa-mir-4251 MI0015861
(SEQ ID NO: 1813)
CACGUCCUCCAGCUUUUUUCCUUAGUGGCCAAUUCCUGAGAAAAGGGCCAACGUGCUUCCA
>hsa-mir-4252 MI0015864
(SEQ ID NO: 1814)
UGGGGGGCUGGCAGCUCAUCAGUCCAGGCCAUCUGGCCACUGAGUCAGCACCAGCGCCCAAUC
>hsa-mir-4253 MI0015860
(SEQ ID NO: 1815)
CCAGCCAUCGCCCUUGAGGGGCCCUAGGACUUACUUGUGCAGGGCAUGUCCAGGGGGUCCAGGUCUGC
>hsa-mir-4254 MI0015862
(SEQ ID NO: 1816)
CUUGGGAGGAGGGUGGGGUGGCUCCUCUGCAGUGAGUAGGUCUGCCUGGAGCUACUCCACCAUCUCCCCCAGCCCC
>hsa-mir-4255 MI0015863
(SEQ ID NO: 1817)
GAGCAUCCUUCAGUGUUCAGAGAUGGAGUCAGUAUUGGUCUGGCCAUUUUUAGGGCAAAGAGGCAGCAUCAU
>hsa-mir-4256 MI0015855
(SEQ ID NO: 1818)
UGUUCCAUUUAUCUGACCUGAUGAAGGUCUCCUGGCAUUGAUUAGGUCUGAUGAUCCAUUUCUG
>hsa-mir-4257 MI0015856
(SEQ ID NO: 1819)
GGCUUAGAAACAGUCCCUAGGUAGGAUUUGGGGAGGAGCUAAGAAGCCCCUACAGGGCCCAGAGGUGGGGACUGAGC
CUUAGUUGG
>hsa-mir-4258 MI0015857
(SEQ ID NO: 1820)
ACGCCCCCCGCCCCGCCACCGCCUUGGAGGCUGACCUCUUACUUUCGGUCGGUCUUCUUCCCUGGGCUUGGUUUGGG
GGCGGGGGAGUGUC
>hsa-mir-4259 MI0015858
(SEQ ID NO: 1821)
GAUGGGCCCCUUGUGUCCUGAAUUGGGUGGGGGCUCUGAGUGGGGAAAGUGGGGGCCUAGGGGAGGUCACAGUUGGG
UCUAGGGGUCAGGAGGGCCCAGGA
>hsa-mir-4260 MI0015859
(SEQ ID NO: 1822)
AACAAGGUGACUUGGGGCAUGGAGUCCCACUUCCUGGAGCCCACACCCCAGCUUGUCACACACCAAC
>hsa-mir-4261 MI0015868
(SEQ ID NO: 1823)
GGUGGAAGUGGGUUCCUCCCAGUUCCUGAGACAGGAAACAGGGACCCAGGAGACCAGC
>hsa-mir-4262 MI0015872
(SEQ ID NO: 1824)
GAAAGCUGCAGGUGCUGAUGUUGGGGGGACAUUCAGACUACCUGCAGCAGAGCC
>hsa-mir-4263 MI0015876
(SEQ ID NO: 1825)
AUAGUGCUCUUCAGGGUUUUACUUGGGAGAUUGGAGUGGCCAGUGUUCCUAAACAAUUCUAAGUGCCUUGGCCCACA
ACAUAC
>hsa-mir-4264 MI0015877
(SEQ ID NO: 1826)
AAAGCUGGAUACUCAGUCAUGGUCAUUGUAACAUGAUAGUGACAGGUACUGGGUAAGACUGCAUAG
>hsa-mir-4265 MI0015869
(SEQ ID NO: 1827)
UGCAGUGGGUUGGAGCUUCAGCCUACACCUGUAAAGAAUUGGUCAGCCUGGGGACUGGUGAUCUCUGCAGCUGUGGG
CUCAGCUCUGGGCUGGGCCUGG
>hsa-mir-4266 MI0015870
(SEQ ID NO: 1828)
CCACUGCUGGCCGGGGCCCCUACUCAAGGCUAGGAGGCCUUGGCCAAGGACAGUC
>hsa-mir-4267 MI0015871
(SEQ ID NO: 1829)
CUCAGCAGGCUCCAGCUCGGUGGCACUGGGGGAAGGCUCCAGACCCCAGCCUCUGUCAUCCCUGCAUGGAGCCCACA
UCUCC
>hsa-mir-4268 MI0015874
(SEQ ID NO: 1830)
AUGCACAUCAGGUUCUAGAGGUUUUGCCCUAGCGGCUCCUCCUCUCAGGAUGUGAUGUCACCUG
>hsa-mir-4269 MI0015875
(SEQ ID NO: 1831)
ACAGCGCCCUGCAGGCACAGACAGCCCUGGCUUCUGCCUCUUUCUUUGUGGAAGCCACUCUGUCAGGCCUGGGAUGG
AGGGGCA
>hsa-mir-4270 MI0015878
(SEQ ID NO: 1832)
ACAAAUAGCUUCAGGGAGUCAGGGGAGGGCAGAAAUAGAUGGCCUUCCCCUGCUGGGAAGAAAGUGGGUC
>hsa-mir-4271 MI0015879
(SEQ ID NO: 1833)
AAAUCUCUCUCCAUAUCUUUCCUGCAGCCCCCAGGUGGGGGGGAAGAAAAGGUGGGGAAUUAGAUUC
>hsa-mir-4272 MI0015880
(SEQ ID NO: 1834)
UUUUCUGCACAAAUUAAUCAGUUAAUGCAUAGAAAGCAUUCAACUAGUGAUUGUGUUAUAAGAG
>hsa-mir-4273 MI0015881
(SEQ ID NO: 1835)
UCCCCUGUGUGUGUUCUCUGAUGGACAGUAAGCCUUGACUUAUGGCUAAAUGCUUCUUCACAAUGGUCACAUGCAUA
GGGCUUU
>hsa-mir-4274 MI0015884
(SEQ ID NO: 1836)
GGGGCAUUUAGGGUAACUGAGCUGCUGCCGGGGCCUGGCGCUCCUCUACCUUGUCAGGUGACCCAGCAGUCCCUCCC
CCUGCAUGGUGCCC
>hsa-mir-4275 MI0015883
(SEQ ID NO: 1837)
ACAUUUUUGUCCAAUUACCACUUCUUUUUGCCACCUGAGCACAGUCAGCAGUCAGCAUAAAAAAGUGAUAAUGGGAA
GUUAAUGUCU
>hsa-mir-4276 MI0015882
(SEQ ID NO: 1838)
CACAGUCUGACUCAGUGACUCAUGUGCUGGCAGUGGCCACGUAAAUAGAGCUACUGUGUCUGAAAGCAAU
>hsa-mir-4277 MI0015886
(SEQ ID NO: 1839)
CUGGGUCGAGGCAGUUCUGAGCACAGUACACUGGGCUGCCCCCACUGCCCAGUGCCCUGCUCAGCUCAAGUCCUUGU
GCCCCUC
>hsa-mir-4278 MI0015888
(SEQ ID NO: 1840)
AUCUAACACCAGGAGAAUCCCAUAGAACAUUGACAUCAACACUAGGGGGUUUGCCCUUGUGGGGAAGAA
>hsa-mir-4279 MI0015887
(SEQ ID NO: 1841)
UGCUCUGUGGAGCUGAGGAGCAGAUUCUCUCUCUCUCCUCCCGGCUUCACCUCCUGAG
>hsa-mir-4280 MI0015889
(SEQ ID NO: 1842)
AAUCAGGGUGGAGUGUAGUUCUGAGCAGAGCCUUAAAGGAUGAGGUAUGUUCAAGACUGAAUGACACCUUUGUGAU
>hsa-mir-4281 MI0015885
(SEQ ID NO: 1843)
GCUGGGGGUCCCCCGACAGUGUGGAGCUGGGGCCGGGUCCCGGGGAGGGGGGUUCUGGGCAG
>hsa-mir-4282 MI0015890
(SEQ ID NO: 1844)
GGUGAAGUUCCAGGGGAAGAUUUUAGUAUGCCACAUUUCUAAAAUUUGCAUCCAGGAACAUCAUCCU
>hsa-mir-4283-1 MI0015892
(SEQ ID NO: 1845)
ACUCUGAUCCUGGGGCUCAGCGAGUUUGCAAGGGGUGUUUCUGUCCAUGGUCAGGCUUGCCAGCCUUGGUCCUUGGG
CCC
>hsa-mir-4283-2 MI0015982
(SEQ ID NO: 1846)
ACUCUGAUCCUGGGGCUCAGCGAGUUUGCAAGGGGUGUUUCUGUCCAUGGUCAGGCUUGCCAGCCUUGGUCCUUGGG
CCC
>hsa-mir-4284 MI0015893
(SEQ ID NO: 1847)
GUUCUGUGAGGGGCUCACAUCACCCCAUCAAAGUGGGGACUCAUGGGGAGAGGGGGUAGUUAGGAGCUUUGAUAGAG
GCGG
>hsa-mir-4285 MI0015891
(SEQ ID NO: 1848)
AUUAGCUGGGGCGGCGAGUCCGACUCAUCAAUAUUUUAAGGAAUGACCCGGCCUUGGGGUGCGGAAUUGCUGCGCGG
GCGGGGGC
>hsa-mir-4286 MI0015894
(SEQ ID NO: 1849)
UACUUAUGGCACCCCACUCCUGGUACCAUAGUCAUAAGUUAGGAGAUGUUAGAGCUGUGAGUACCAUGACUUAAGUG
UGGUGGCUUAAACAUG
>hsa-mir-4287 MI0015895
(SEQ ID NO: 1850)
UAGUUCUUUUUCUCCCUUGAGGGCACUUUUCAGUUCCUGAGAUCAAUGUGGUCCCUACUGGGGAGACCAUAGGAGCCC
>hsa-mir-4288 MI0015896
(SEQ ID NO: 1851)
AUGGAGGUGGAGAGUCAUCAGCAGCACUGAGCAGGCAGUGUUGUCUGCUGAGUUUCCACGUCAUUUG
>hsa-mir-4289 MI0015898
(SEQ ID NO: 1852)
CCUUGGGAGGGCAUUGUGCAGGGCUAUCAGGCAGUUUCCUGGGCCCUGUCUGCAGAGCCUAAACAGAUCA
>hsa-mir-4290 MI0015899
(SEQ ID NO: 1853)
GCCACCAAGAAGGUGAAGGGAGGGUCAGUCCCAAUCUGAAUCCCACCAAAAUAGGUGGUAGAGGGUUGCCCUCCUUU
CUUCCCUCACCUCUGACC
>hsa-mir-4291 MI0015900
(SEQ ID NO: 1854)
CGCCGGGGGCUUCAGCAGGAACAGCUGGGUGGAGGCAGAGCUGUUCUGCUGUGGCUGCAGCCCUG
>hsa-mir-4292 MI0015897
(SEQ ID NO: 1855)
GAGACACCAGAAGGCCACCUGCUUAGGAGGCCAGAGGUGCCCCUGGGCCGGCCUUGGUGAGGGGCCC
>hsa-mir-4293 MI0015826
(SEQ ID NO: 1856)
AGAGACACCUGUUCCUUGGGAAGCUGGUGACAUUGCUAAUUCAUUUCACACCAGCCUGACAGGAACAGCCUGACUGAA
>hsa-mir-4294 MI0015827
(SEQ ID NO: 1857)
CCGAUGCCUCGGGAGUCUACAGCAGGGCCAUGUCUGUGAGGGCCCAAGGGUGCAUGUGUCUCCCAGGUUUCGGUGC
>hsa-mir-4295 MI0015822
CUUUGUGGAACAGUGCAAUGUUUUCCUUGCCUGUGGCAAGACCACUUCGGUUCAAGGCUAAGAAACUAGACUGUUCC
UACAGAGA
>hsa-mir-4296 MI0015823
(SEQ ID NO: 1859)
UUGGGCUUUGAUGUGGGCUCAGGCUCAGAGGGCUGAAGUGGUUGUGGGGAGGGGCUUCUGGGGACUGUGUCCAUGUC
UCUGUCGUUUU
>hsa-mir-4297 MI0015824
(SEQ ID NO: 1860)
AGCACGCACGUGCCUUCCUGUCUGUGCCUGCCUUCGAAGUGCACGGCAGGGCCAGGACGGGUCGCUGUGGGUGGGG
>hsa-mir-4298 MI0015830
(SEQ ID NO: 1861)
GGGGAGGUACCUGGGACAGGAGGAGGAGGCAGCCUUGCCUCAGAAACCAAACUGUCAAAAGUGUAGGUUCCAC
>hsa-mir-4299 MI0015829
(SEQ ID NO: 1862)
GGGUUCUGACCAAUCAUGUUACAGUGUUUUCUCCUUUAGAGAGAGCUGGUGACAUGAGAGGCAGAAAAAGGA
>hsa-mir-4300 MI0015831
(SEQ ID NO: 1863)
UGAGUUUAGAAGAGGGCCAGCUAAAUCAGCAGAGACAUGAGGUGAUCAAAAACCUUUUUUCAAAGCAGUGGGAGCUG
GACUACUUCUGAACCAAUA
>hsa-mir-4301 MI0015828
(SEQ ID NO: 1864)
ACCAGCCACCUCCCACUACUUCACUUGUGAACAUUGCAUUCGUGGAGGGUGGCAGGUGCAGCUCUG
>hsa-mir-4302 MI0015833
(SEQ ID NO: 1865)
UCAGGAGGGACCAGUGUGGCUCAGCGAGGUGGCUGAGUUUACUUAAGGUAUUGGAAUGAG
>hsa-mir-4303 MI0015834
(SEQ ID NO: 1866)
AGAAAAUAGCUUCUGAGCUGAGGACAGCUUGCUCUGCUUUUCUUUAGCUUAGGAGCUAACCAUGGU
>hsa-mir-4304 MI0015832
(SEQ ID NO: 1867)
AGAGAAGUGGCCGGCAUGUCCAGGGCAUCCCCAUUGCUCUGUGACUGCUGCCAUCCUUCUCC
>hsa-mir-4305 MI0015835
(SEQ ID NO: 1868)
CUGCCUUAGACCUAGACACCUCCAGUUCUGGGUUCUUAGAGGCCUAAUCCUCUACAAACUCAGUUUUCAGACUGUGA
GGGAAAUUCUCUGUCUUAUUGCUUU
>hsa-mir-4306 MI0015836
(SEQ ID NO: 1869)
AAGCUGCUUAGUGUCCUUAGAGUCUCCAGAGGCAUCCCUAACCCAGAAUCUUUUGACUGUCCUCUGGAGAGAAAGGC
AGUAGGUCUGUACC
>hsa-mir-4307 MI0015838
(SEQ ID NO: 1870)
UCAGAAGAAAAAACAGGAGAUAAAGUUUGUGAUAAUGUUUGUCUAUAUAGUUAUGAAUGUUUUUUCCUGUUUCCUUC
AGGGCCA
>hsa-mir-4308 MI0015839
(SEQ ID NO: 1871)
UAUGGGUUCAGAGGGAACUCCAUUGGACAGAAAUUUCCUUUUGAGGAAAUCUUUCCCUGGAGUUUCUUCUUACCUUU
UUCC
>hsa-mir-4309 MI0015837
(SEQ ID NO: 1872)
UCUGGGGGUUCUGGAGUCUAGGAUUCCAGGAUCUGGGUUUUGAGGUCUUGGGUUGUAGGGUCUGCGGUUUGAAGCCC
CUCUUG
>hsa-mir-4310 MI0015840
(SEQ ID NO: 1873)
UGGCGUCUGGGGCCUGAGGCUGCAGAACAUUGCAGCAUUCAUGUCCCACCCCCACCA
>hsa-mir-4311 MI0015841
(SEQ ID NO: 1874)
UCAGAGAGGGGAAAGAGAGCUGAGUGUGACCUGGAGCAGCUCAGGAGGGCUUCCUGGGUGAGGUGGCAGGUUACAGG
UUCGAUCUUUGGCCCUCAGAUUC
>hsa-mir-4312 MI0015842
(SEQ ID NO: 1875)
GAAAGGUUGGGGGCACAGAGAGCAAGGAGCCUUCCCCAGAGGAGUCAGGCCUUGUUCCUGUCCCCAUUCCUCAGAG
>hsa-mir-4313 MI0015843
(SEQ ID NO: 1876)
GAUCAGGCCCAGCCCCCUGGCCCCAAACCCUGCAGCCCCAGCUGGAGGAUGAGGAGAUGCUGGGCUUGGGUGGGGGA
AUCAGGGGUGUAAAGGGGCCUGCU
>hsa-mir-4314 MI0015846
(SEQ ID NO: 1877)
GGCCAUUCCUCUCUGGGAAAUGGGACAGGUAGUGGCCACAGUGAGAAAGCUGGCCUGUCCUUCUGCCCCAGGGCCCA
GAGUCUGUGACUGGA
>hsa-mir-4315-1 MI0015844
(SEQ ID NO: 1878)
UGGGCUUUGCCCGCUUUCUGAGCUGGACCCUCUCUCUACCUCUGGUGCAGAACUACAGCGGAAGGAAUCUCUG
>hsa-mir-4315-2 MI0015983
(SEQ ID NO: 1879)
UGGGCUUUGCCCGCUUUCUGAGCUGGACCCUCUCUCUACCUCUGGUGCAGAACUACAGCGGAAGGAAUCUCUG
>hsa-mir-4316 MI0015845
(SEQ ID NO: 1880)
AGUGGCCCAGGGUGAGGCUAGCUGGUGUGGUCACCCACUCUCCAGCCCAGCCCCAAUCCCACCACAACCAC
>hsa-mir-4317 MI0015850
(SEQ ID NO: 1881)
AAAAGGCGAGACAUUGCCAGGGAGUUUAUUUUGUAGCUCUCUUGAUAAAAUGUUUUAGCAAACAC
>hsa-mir-4318 MI0015847
(SEQ ID NO: 1882)
GCUUCUUAAUUAUGUCAUAAACCCACUGUGGACAAGGGCCUUGUCUUAGACAGUCACUGUGGGUACAUGCUAGGUGC
UCAA
>hsa-mir-4319 MI0015848
(SEQ ID NO: 1883)
UUGGCUUGAGUCCCUGAGCAAAGCCACUGGGAAUGCUCCCUGAGGACGUUAUAUGAGUGCUCAGCUCAUGGGGCUAU
GAUGGUCA
>hsa-mir-4320 MI0015849
(SEQ ID NO: 1884)
GACAUGUGGGGUUUGCUGUAGACAUUUCAGAUAACUCGGGAUUCUGUAGCUUCCUGGCAACUUUG
>hsa-mir-4321 MI0015852
(SEQ ID NO: 1885)
CUGGUCUCCGCAGAGCCUCUGCCCCUCCCGAGACACCCGCUACCUGGUGUUAGCGGUGGACCGCCCUGCGGGGGCCU
GGC
>hsa-mir-4322 MI0015851
(SEQ ID NO: 1886)
ACCGCGAGUUCCGCGCCUGGCCGUGUCGCCCCACGAGGGGGACUGUGGGCUCAGCGCGUGGGGCCCGGAGCAU
>hsa-mir-4323 MI0015853
(SEQ ID NO: 1887)
CGGGGCCCAGGCGGGCAUGUGGGGUGUCUGGAGACGCCAGGCAGCCCCACAGCCUCAGACCUCGGGCAC
>hsa-mir-4324 MI0015854
(SEQ ID NO: 1888)
CGGCCCCUUUGUUAAGGGUCUCAGCUCCAGGGAACUUUAAAACCCUGAGACCCUAACCUUAAAGGUGCUGCA
>hsa-mir-4325 MI0015865
(SEQ ID NO: 1889)
GGGGAAGAUGUUGCACUUGUCUCAGUGAGAGAUGCUUCUAGAUCCAGGAGGCAGACCUCAAGGAUGGAGAGAAGGCA
GAUCCUUUGAGAU
>hsa-mir-4326 MI0015866
(SEQ ID NO: 1890)
GCUGCUCUGCUGUUCCUCUGUCUCCCAGACUCUGGGUGGAUGGAGCAGGUCGGGGGCCA
>hsa-mir-4327 MI0015867
(SEQ ID NO: 1891)
GGCCUGGGUAGGCUUGCAUGGGGGACUGGGAAGAGACCAUGAACAGGUUAGUCCAGGGAGUUCUCAUCAAGCCUUUA
CUCAGUAG
>hsa-mir-4328 MI0015904
(SEQ ID NO: 1892)
AACAGUUGAGUCCUGAGAACCAUUGAGAACCAGUUUUCCCAGGAUUAACUGUUCCG
>hsa-mir-4329 MI0015901
(SEQ ID NO: 1893)
UAGAGAGGAAGGUGUACCAGGGUUUUGGAGUUUUUUUUUCCUCCUGAGACCCUAGUUCCACAUUCUGGAGC
>hsa-mir-4330 MI0015902
(SEQ ID NO: 1894)
AAUUGUCAGCAGGCAAUUAUCUGAGGAUGCAGGAGAGGAAGGGGGCUUCUUUUUGACGCCUACUUCAUCAGCUGCUC
CUCAGAUCAGAGCCUUGCAGGUCAGGCC
>hsa-mir-4417 MI0016753
(SEQ ID NO: 1895)
GAAAACAACCAGGUGGGCUUCCCGGAGGGCGGAACACCCAGCCCCAGCAUCCAGGGCUCACCUACCACGUUUG
>hsa-mir-4418 MI0016754
(SEQ ID NO: 1896)
UGGUUUUUGCUCUGAGUGACCGUGGUGGUUGUGGGAGUCACUGCAGGACUCAGCAGGAAUUC
>hsa-mir-4419a MI0016755
(SEQ ID NO: 1897)
UGGUGGUGUGUGCCUGUAGUCUUAGCUACUCGGGAGGCUGAGGGAGGAGACUGCAGUGAGUGGAGGUCACGCCACUG
>hsa-mir-4419b MI0016861
(SEQ ID NO: 1898)
CUCAGGCUCAGUGGUGCAUGCUUAUAGUCCCAGCCACUCUGGAGGCUGAAGGAAGAUGGCUUGAGCCU
>hsa-mir-4420 MI0016757
(SEQ ID NO: 1899)
CUCUUGGUAUGAACAUCUGUGUGUUCAUGUCUCUCUGUGCACAGGGGACGAGAGUCACUGAUGUCUGUAGCUGAGAC
>hsa-mir-4421 MI0016758
(SEQ ID NO: 1900)
CUGGGUCUCCUUUCUGCUGAGAGUUGAACACUUGUUGGGACAACCUGUCUGUGGAAAGGAGCUACCUAC
>hsa-mir-4422 MI0016759
(SEQ ID NO: 1901)
AGUUCUUCUGCAGACAAAAGCAUCAGGAAGUACCCACCAUGUACCAGUGGGCCCUUCUUGAUGCUCUUGAUUGCAGA
GGAGCC
>hsa-mir-4423 MI0016760
(SEQ ID NO: 1902)
AUCAUGUACUGCAGUUGCCUUUUUGUUCCCAUGCUGUUUAAGCCUAGCAUAGGCACCAAAAAGCAACAACAGUAUGU
GAA
>hsa-mir-4424 MI0016763
(SEQ ID NO: 1903)
CUUACAUCACACACAGAGUUAACUCAAAAUGGACUAAUUUUUCCACUAGUUAGUCCAUUUCAAGUUAACUCUGUGUG
UGAUGUAGU
>hsa-mir-4425 MI0016764
(SEQ ID NO: 1904)
GUGCUUUACAUGAAUGGUCCCAUUGAAUCCCAACAGCUUUGCGAAGUGUUGUUGGGAUUCAGCAGGACCAUUCGUGU
AAAGUAA
>hsa-mir-4426 MI0016765
(SEQ ID NO: 1905)
AGUUGGAAGAUGGACGUACUUUGUCUGACUACAAUAUUCAAAAGGAGUCUACUCUUCAUCUUG
>hsa-mir-4427 MI0016766
(SEQ ID NO: 1906)
GAAGCCUCUUGGGGCUUAUUUAGACAAUGGUUUCAUCAUUUCGUCUGAAUAGAGUCUGAAGAGUCUUU
>hsa-mir-4428 MI0016767
(SEQ ID NO: 1907)
UUGGCAGGUGCCAUGUUGCCUGCUCCUUACUGUACACGUGGCUGGCAAGGAGACGGGAACAUGGAGCCGCCAU
>hsa-mir-4429 MI0016768
(SEQ ID NO: 1908)
AGGGAGAAAAGCUGGGCUGAGAGGCGACUGGUGUCUAAUUUGUUUGUCUCUCCAACUCAGACUGCCUGGCCCA
>hsa-mir-4430 MI0016769
(SEQ ID NO: 1909)
GUGAGGCUGGAGUGAGCGGAGAUCGUACCACUGCACUCCAACCUGGUGA
>hsa-mir-4431 MI0016771
(SEQ ID NO: 1910)
UGGUUUGCGACUCUGAAAACUAGAAGGUUUAUGACUGGGCAUUUCUCACCCAAUGCCCAAUAUUGAACUUUCUAGUU
GUCAGAGUCAUUAACCC
>hsa-mir-4432 MI0016772
(SEQ ID NO: 1911)
GCAUCUUGCAGAGCCGUUCCAAUGCGACACCUCUAGAGUGUCAUCCCCUAGAAUGUCACCUUGGAAAGACUCUGCAA
GAUGCCU
>hsa-mir-4433 MI0016773
(SEQ ID NO: 1912)
CAUCCUCCUUACGUCCCACCCCCCACUCCUGUUUCUGGUGAAAUAUUCAAACAGGAGUGGGGGUGGGACAUAAGGAG
GAUA
>hsa-mir-4434 MI0016774
(SEQ ID NO: 1913)
UCACUUUAGGAGAAGUAAAGUAGAACUUUGGUUUUCAACUUUUCCUACAGUGU
>hsa-mir-4435-1 MI0016775
(SEQ ID NO: 1914)
AGGCAGCAAAUGGCCAGAGCUCACACAGAGGGAUGAGUGCACUUCACCUGCAGUGUGACUCAGCAGGCCAACAGAUG
CUA
>hsa-mir-4435-2 MI0016777
(SEQ ID NO: 1915)
GCAAAUGGCCAGAGCUCACACAGAGGGAUGAGUGCACUUCACCUGCAGUGUGACUCAGCAGGCCAACAGAUGCU
>hsa-mir-4436a MI0016776
(SEQ ID NO: 1916)
GCCUCACUUUUCCACUUAUGCCUGCCCUGCCCCUCGAAUCUGCUCCACGAUUUGGGCAGGACAGGCAGAAGUGGAUA
AGUGAGGA
>hsa-mir-4436b-1 MI0017425
(SEQ ID NO: 1917)
GUGUCCUCACUUGUCCACUUCUGCCUGCCCUGCCCAAAUGGUGGAGCAGAUUCGAGGGGCAGGGCAGGAAGAAGUGG
ACAAGUGAGGCCAU
>hsa-mir-4436b-2 MI0019110
(SEQ ID NO: 1918)
GUGUCCUCACUUGUCCACUUCUGCCUGCCCUGCCCAAAUGGUGGAGCAGAUUCGAGGGGCAGGGCAGGAAGAAGUGG
ACAAGUGAGGCCAU
>hsa-mir-4437 MI0016778
(SEQ ID NO: 1919)
ACUUUGUGCAUUGGGUCCACAAGGAGGGGAUGACCCUUGUGGGCUCAGGGUACAAAGGUU
>hsa-mir-4438 MI0016781
(SEQ ID NO: 1920)
UAAGUGUAAACUUAAGGACUGUCUUUUCUAAGCCUGUGCCUUGCCUUUCCUUUGGCACAGGCUUAGAAAAGACAGUC
UUUAAGUUUACACUUC
>hsa-mir-4439 MI0016782
(SEQ ID NO: 1921)
CCAGUGACUGAUACCUUGGAGGCAUUUUAUCUAAGAUACACACAAAGCAAAUGCCUCUAAGGUAUCAGUUUACCAGG
CCA
>hsa-mir-4440 MI0016783
(SEQ ID NO: 1922)
CUCUCACCAAGCAAGUGCAGUGGGGCUUGCUGGCUUGCACCGUGACUCCCUCUCACCAAGCAAGUGUCGUGGGGCUU
GCUGGCUUGCACUGUGAAGAU
>hsa-mir-4441 MI0016784
(SEQ ID NO: 1923)
CAGAGUCUCCUUCGUGUACAGGGAGGAGACUGUACGUGAGAGAUAGUCAGAUCCGCAUGUUAGAGCAGAGUCUCCUU
CGUGUACAGGGAGGAGAUUGUAC
>hsa-mir-4442 MI0016785
(SEQ ID NO: 1924)
GCGCCCUCCCUCUCUCCCCGGUGUGCAAAUGUGUGUGUGCGGUGUUAUGCCGGACAAGAGGGAGGUG
>hsa-mir-4443 MI0016786
(SEQ ID NO: 1925)
GGUGGGGGUUGGAGGCGUGGGUUUUAGAACCUAUCCCUUUCUAGCCCUGAGCA
>hsa-mir-4444-1 MI0016787
(SEQ ID NO: 1926)
GUGACGACUGGCCCCGCCUCUUCCUCUCGGUCCCAUAUUGAACUCGAGUUGGAAGAGGCGAGUCCGGUCUCAAA
>hsa-mir-4444-2 MI0019111
(SEQ ID NO: 1927)
GUGACGACUGGCCCCGCCUCUUCCUCUCGGUCCCAUAUUGAACUCGAGUUGGAAGAGGCGAGUCCGGUCUCAAA
>hsa-mir-4445 MI0016788
(SEQ ID NO: 1928)
UUCCUGCAGAUUGUUUCUUUUGCCGUGCAAGUUUAAGUUUUUGCACGGCAAAAGAAACAAUCCAGAGGGU
>hsa-mir-4446 MI0016789
(SEQ ID NO: 1929)
CUGGUCCAUUUCCCUGCCAUUCCCUUGGCUUCAAUUUACUCCCAGGGCUGGCAGUGACAUGGGUCAA
>hsa-mir-4447 MI0016790
(SEQ ID NO: 1930)
GUUCUAGAGCAUGGUUUCUCAUCAUUUGCACUACUGAUACUUGGGGUCAGAUAAUUGUUUGUGGUGGGGGCUGUUGU
UUGCAUUGUAGGAU
>hsa-mir-4448 MI0016791
(SEQ ID NO: 1931)
AGGAGUGACCAAAAGACAAGAGUGCGAGCCUUCUAUUAUGCCCAGACAGGGCCACCAGAGGGCUCCUUGGUCUAGGG
GUAAUGCCA
>hsa-mir-4449 MI0016792
(SEQ ID NO: 1932)
AGCAGCCCUCGGCGGCCCGGGGGGCGGGCGGCGGUGCCCGUCCCGGGGCUGCGCGAGGCACAGGCG
>hsa-mir-4450 MI0016795
(SEQ ID NO: 1933)
UGUCUGGGGAUUUGGAGAAGUGGUGAGCGCAGGUCUUUGGCACCAUCUCCCCUGGUCCCUUGGCU
>hsa-mir-4451 MI0016797
(SEQ ID NO: 1934)
UCUGUACCUCAGCUUUGCUCCCAACCAACCACUUCCACAUGUUUUGCUGGUAGAGCUGAGGACAGC
>hsa-mir-4452 MI0016798
(SEQ ID NO: 1935)
UGGAUCACUUGAGGCCAAGAGUGCAAGGCUGUAGUGUGCACAGCCUUGAAUUCUUGGCCUUAAGUGAUCCC
>hsa-mir-4453 MI0016799
(SEQ ID NO: 1936)
UGGAGAGCUUGGUCUGUAGCGGUUUCCUUCGGGGCAGGUGGGGACUGCUCCUUUGGGAGGAAGGAGGAGGCCCAGGC
CGCGUCUUCAGG
>hsa-mir-4454 MI0016800
(SEQ ID NO: 1937)
CCGGAUCCGAGUCACGGCACCAAAUUUCAUGCGUGUCCGUGUGAAGAGACCACCA
>hsa-mir-4455 MI0016801
(SEQ ID NO: 1938)
AGAAGGGUGUGUGUGUUUUUCCUGAGAAUAAGAGAAGGAAGGACAGCCAAAUUCUUCA
>hsa-mir-4456 MI0016802
(SEQ ID NO: 1939)
AUGAACCUGGUGGCUUCCUUUUCUGGGAGGAAGUUAGGGUUCA
>hsa-mir-4457 MI0016803
(SEQ ID NO: 1940)
GGAGUACUCCAGUCAAUACCGUGUGAGUUAGAAAAGCUCAAUUCACAAGGUAUUGACUGGCGUAUUCA
>hsa-mir-4458 MI0016804
(SEQ ID NO: 1941)
GAGCGCACAGAGGUAGGUGUGGAAGAAAGUGAAACACUAUUUUAGGUUUUAGUUACACUCUGCUGUGGUGUGCUG
>hsa-mir-4459 MI0016805
(SEQ ID NO: 1942)
ACCCAGGAGGCGGAGGAGGUGGAGGUUGCAGUGAGCCAAGAUCGUGGCACUGACUCCAGCCUGGGG
>hsa-mir-4460 MI0016806
(SEQ ID NO: 1943)
GUUUUUUGCCCAUAGUGGUUGUGAAUUUACCUUCUCCUCUUUGCAGUGAUAAAGGAGGUAAAUUCACAACCACUGUG
GGCAGAAAC
>hsa-mir-4461 MI0016807
(SEQ ID NO: 1944)
GAGUAGGCUUAGGUUAUGUACGUAGUCUAGGCCAUACGUGUUGGAGAUUGAGACUAGUAGGGCUAGGCCUACUG
>hsa-mir-4462 MI0016810
(SEQ ID NO: 1945)
CUUCCCAGCUGCCCUAAGUCAGGAGUGGCUUUCCUGACACGGAGGGUGGCUUGGGAAA
>hsa-mir-4463 MI0016811
(SEQ ID NO: 1946)
AAUAGAUUAUUGGUCACCACCUCCAGUUUCUGAAUUUGUGAGACUGGGGUGGGGCCUGAGAAUUUGC
>hsa-mir-4464 MI0016812
(SEQ ID NO: 1947)
GGAACCUUAGUAAGGUUUGGAUAGAUGCAAUAAAGUAUGUCCACAGCUGAAAGGACAUACUUUAUUGCAUGUAUCCA
AACCUUACUAAUUCA
>hsa-mir-4465 MI0016816
(SEQ ID NO: 1948)
CAUGUGUCCCCUGGCACGCUAUUUGAGGUUUACUAUGGAACCUCAAGUAGUCUGACCAGGGGACACAUGA
>hsa-mir-4466 MI0016817
(SEQ ID NO: 1949)
ACGCGGGUGCGGGCCGGCGGGGUAGAAGCCACCCGGCCCGGCCCGGCCCGGCGA
>hsa-mir-4467 MI0016818
(SEQ ID NO: 1950)
UGGUGGCGGCGGUAGUUAUGGGCUUCUCUUUCUCACCAGCAGCCCCUGGGCCGCCGCCUCCCU
>hsa-mir-4468 MI0016819
(SEQ ID NO: 1951)
AGUCUUCUCCUGGGGCUUUGGUGGCUAUGGUUGACUGGGCCACUCAGAGCAGAAGGAUGAGAUG
>hsa-mir-4469 MI0016820
(SEQ ID NO: 1952)
CCGACGCGGAGAGCGGCUCUAGGUGGGUUUGGCGGCGGCGAGGACACCGCCGCUCCCUCUAGGGUCGCUCGGAGCGU
GA
>hsa-mir-4470 MI0016821
(SEQ ID NO: 1953)
CGAGCCUCUUUCGGCUUUCCAGUUUGUCUCGGUCCUUUGGAACGUGGCAAACGUGGAAGCCGAGAGGGCUCU
>hsa-mir-4471 MI0016822
(SEQ ID NO: 1954)
CCAAAUUUAAAACUUAAACCUCUACUAAGUUUCCAUGAAAAGAACCCAUGGGAACUUAGUAGAGGUUUAAGUUUUAA
AUUUGA
>hsa-mir-4472-1 MI0016823
(SEQ ID NO: 1955)
UGGCAGACCCUUGCUCUCUCACUCUCCCUAAUGGGGCUGAAGACAGCUCAGGGGCAGGGUGGGGGGUGUUGUUUUUG
UUU
>hsa-mir-4472-2 MI0016824
(SEQ ID NO: 1956)
UGGUGGGGGUGGGGGGUGUUGUUUUUGUUUUUGAGACAGAGUCUUGCUCCGUCGCCCAGGCCGGAGU
>hsa-mir-4473 MI0016825
(SEQ ID NO: 1957)
AAGGAACAGGGGACACUUGUAAUGGAGAACACUAAGCUAUGGACUGCUAUGGACUGCUAGUGCUCUCCGUUACAAGU
AUCCCCUGUUACCU
>hsa-mir-4474 MI0016826
(SEQ ID NO: 1958)
UUGCCUACCUUGUUAGUCUCAUGAUCAGACACAAAUAUGGCUCUUUGUGGCUGGUCAUGAGGCUAACAAGGUAGGCAC
>hsa-mir-4475 MI0016827
(SEQ ID NO: 1959)
AUCUCAAUGAGUGUGUGGUUCUAAAUGACUCAUAGUCAAGGGACCAAGCAUUCAUUAUGAA
>hsa-mir-4476 MI0016828
(SEQ ID NO: 1960)
AAAAGCCUGUCCCUAAGUCCCUCCCAGCCUUCCAGAGUUGGUGCCAGGAAGGAUUUAGGGACAGGCUUUG
>hsa-mir-4477a MI0016829
(SEQ ID NO: 1961)
UCCUCCUCCCAUCAAUCACAAAUGUCCUUAAUGGCAUUUAAGGAUUGCUAUUAAGGACAUUUGUGAUUCACGGGAGG
AGGU
>hsa-mir-4477b MI0016830
(SEQ ID NO: 1962)
ACCUCCUCCCGUGAAUCACAAAUGUCCUUAAUAGCAAUCCUUAAAUGCCAUUAAGGACAUUUGUGAUUGAUGGGAGG
AGGA
>hsa-mir-4478 MI0016831
(SEQ ID NO: 1963)
GGCCGAGGCUGAGCUGAGGAGCCUCCAAACCUGUAGACAGGGUCAUGCAGUACUAGGGGCGAGCCUCAUCCCCUGCA
GCCCUGGCC
>hsa-mir-4479 MI0016838
(SEQ ID NO: 1964)
GAAACCAAGUCCGAGCGUGGCUGGCGCGGGAAAGUUCGGGAACGCGCGCGGCCGUGCUCGGAGCAGCGCCA
>hsa-mir-4480 MI0016841
(SEQ ID NO: 1965)
GCAGAGGUGAGUUGACCUCCACAGGGCCACCCAGGGAGUAAGUAGCCAAGUGGAAGUUACUUUACCUCUGU
>hsa-mir-4481 MI0016842
(SEQ ID NO: 1966)
GGAGUGGGCUGGUGGUUUUUUAAGAGGAAGGGAGACCUAAGCUAGCACAUGAGCACGCUC
>hsa-mir-4482-1 MI0016843
(SEQ ID NO: 1967)
AGUGAGCAACCCAGUGGGCUAUGGAAAUGUGUGGAAGAUGGCAUUUCUAUUUCUCAGUGGGGCUCUUACC
>hsa-mir-4482-2 MI0017872
(SEQ ID NO: 1968)
AAUAAAAAUUGAAUAGUGAGCAACCCAGUGGGCUAUGGAAAUGUGUGGAAGAUGGCAUUUCUAUUUCUCAGUGGGGC
UCUUACCUAUUACUCAUCAAC
>hsa-mir-4483 MI0016844
(SEQ ID NO: 1969)
AAAAAACAACAUACUUAGUGCAUACCCAUAUAAUAUUAGGGGUGGUCUGUUGUUGUUUUUCU
>hsa-mir-4484 MI0016845
(SEQ ID NO: 1970)
GGGUUUCCUCUGCCUUUUUUUCCAAUGAAAAUAACGAAACCUGUUAUUUCCCAUUGAGGGGGAAAAAGGCGGGAGAA
GCCCCA
>hsa-mir-4485 MI0016846
(SEQ ID NO: 1971)
AGAGGCACCGCCUGCCCAGUGACAUGCGUUUAACGGCCGCGGUACCCUAACUGUGCA
>hsa-mir-4486 MI0016847
(SEQ ID NO: 1972)
GCAUGCUGGGCGAGGCUGGCAUCUAGCACAGGCGGUAGAUGCUUGCUCUUGCCAUUGCAAUGA
>hsa-mir-4487 MI0016848
(SEQ ID NO: 1973)
ACUGUCCUUCAGCCAGAGCUGGCUGAAGGGCAGAAGGGAACUGUCCUUCAGCCAGAGCUGGCUGAAGGGCAGA
>hsa-mir-4488 MI0016849
(SEQ ID NO: 1974)
GGUAGGGGGCGGGCUCCGGCGCUGGGACCCCACUAGGGUGGCGCCUUGGCCCCGCCCCGCCC
>hsa-mir-4489 MI0016850
(SEQ ID NO: 1975)
GGGGGUGGGGCUAGUGAUGCAGGACGCUGGGGACUGGAGAAGUCCUGCCUGACCCUGUCCCA
>hsa-mir-4490 MI0016852
(SEQ ID NO: 1976)
AUAGUUUCUGCAAUGCUCAAAUCUCUGGCCAAAGACCAGAACUUAAUGGUCUCUGGUAAGAGAUUUGGGCAUAUUAG
AAACUAA
>hsa-mir-4491 MI0016853
(SEQ ID NO: 1977)
ACAUUUGGUCACACCAGUCCACAUUAACGUGGACCAGACAAUAUUAAUGUGGACUGGUGUGACCAAAA
>hsa-mir-4492 MI0016854
(SEQ ID NO: 1978)
CUGCAGCGUGCUUCUCCAGGCCCCGCGCGCGGACAGACACACGGACAAGUCCCGCCAGGGGCUGGGCGCGCGCCAGC
CGG
>hsa-mir-4493 MI0016855
(SEQ ID NO: 1979)
CCAGAGAUGGGAAGGCCUUCCGGUGAUUAUCACAGCCAUGCCUUUACCUCCAGAAGGCCUUUCCAUCUCUGUC
>hsa-mir-4494 MI0016856
(SEQ ID NO: 1980)
AGUUUUAGUUACCCUGGUCAUCUGCAGUCUGAAAAUACAAAAUGGAAAAUUCCAGACUGUGGCUGACCAGAGGUAAC
UGAAACC
>hsa-mir-4495 MI0016857
(SEQ ID NO: 1981)
AAGAAAUGUAAACAGGCUUUUUGCUCAGUGGAGUUAUUUUGAGCAAAAAGCUUAUUUACAUUUCUG
>hsa-mir-4496 MI0016858
(SEQ ID NO: 1982)
ACAUCAGCUCAUAUAAUCCUCGAAGCUGCCUUUAGAAAUGAGGAAACUGAAGCUGAGAGGG
>hsa-mir-4497 MI0016859
(SEQ ID NO: 1983)
ACCUCCGGGACGGCUGGGCGCCGGCGGCCGGGAGAUCCGCGCUUCCUGAAUCCCGGCCGGCCCGCCCGGCGCCCGUC
CGCCCGCGGGUC
>hsa-mir-4498 MI0016860
(SEQ ID NO: 1984)
AGGGCUGGGCUGGCAGGGCAAGUGCUGCAGAUCUUUGUCUAAGCAGCCCCUGCCUUGGAUCUCCCA
>hsa-mir-4499 MI0016862
(SEQ ID NO: 1985)
AAGACUGAGAGGAGGGAACUGGUGAGUUGUACAUAGAAAUGCUUUCUAACUCCUUGUCUCAGUCUGUUU
>hsa-mir-4500 MI0016863
(SEQ ID NO: 1986)
CAGGAGAGAAAGUACUGCCCAGAAGCUAAAGUGUAGAUCAAACGCAUAAUGGCUGAGGUAGUAGUUUCUUGAACUU
>hsa-mir-4501 MI0016864
(SEQ ID NO: 1987)
UAUGUGACCUCGGAUGAAUCACUGAAAUAUGUCUGAGCUUCUGUUUCAUCAGAUGUCACAUUUU
>hsa-mir-4502 MI0016865
(SEQ ID NO: 1988)
AGCCUUUAGCAAGUUGUAAUCUUUUUGCUGAUGGAGGGUCUUGCCUCCAUGGGGAUGGCUGAUGAUGAUGGUGCUGA
AGGC
>hsa-mir-4503 MI0016866
(SEQ ID NO: 1989)
ACAAUGUAGAUAUUUAAGCAGGAAAUAGAAUUUACAUAUAAAUUUCUAUUUGUUUCUAUUUCCUGCUUAAAUAUCUA
CAUUGC
>hsa-mir-4504 MI0016867
(SEQ ID NO: 1990)
CUAAGAUAAUGUCCUCCAGGUUCAUCUCUGUUGUCAUUUGUGGCAUGGACCAUUUGUGACAAUAGAGAUGAACAUGG
AGGAUAUUAUCUUAA
>hsa-mir-4505 MI0016868
(SEQ ID NO: 1991)
GGAGGCUGGGCUGGGACGGACACCCGGCCUCCACUUUCUGUGGCAGGUACCUCCUCCAUGUCGGCCCGCCUUG
>hsa-mir-4506 MI0016869
(SEQ ID NO: 1992)
UGGCCUCUGCCAUCAGACCAUCUGGGUUCAAGUUUGGCUCCAUCUUUAUGAAAUGGGUGGUCUGAGGCAAGUGGUCU
>hsa-mir-4507 MI0016871
(SEQ ID NO: 1993)
UCUGGGCUGAGCCGAGCUGGGUUAAGCCGAGCUGGGUUGGGCUGGGCUGGGU
>hsa-mir-4508 MI0016872
(SEQ ID NO: 1994)
AGGACCCAGCGGGGCUGGGCGCGCGGAGCAGCGCUGGGUGCAGCGCCUGCGCCGGCAGCUGCAAGGGCCG
>hsa-mir-4509-1 MI0016873
(SEQ ID NO: 1995)
CUUUAAUACUAUCUCAAACUAAAGGAUAUAGAAGGUUUUCCCUUUCUCUUGCCCUGAAACCUUCUGUAUCCUUUAUU
UUGAGAUAGUAUUAGAA
>hsa-mir-4509-2 MI0016874
(SEQ ID NO: 1996)
CUUUAAUACUAUCUCAAACUAAAGGAUAUAGAAGGUUUUCCCUUUCUCUUGCCCUGAAACCUUCUGUAUCCUUUAUU
UUGAGAUAGUAUUAGAA
>hsa-mir-4509-3 MI0016875
(SEQ ID NO: 1997)
CUUUAAUACUAUCUCAAACUAAAGGAUAUAGAAGGUUUUCCCUUUCUCUUGCCCUGAAACCUUCUGUAUCCUUUAUU
UUGAGAUAGUAUUAGAA
>hsa-mir-4510 MI0016876
(SEQ ID NO: 1998)
GUGUAUGUGAGGGAGUAGGAUGUAUGGUUGUUAGAUAGACAACUACAAUCUUUUCUCACAACAGACAG
>hsa-mir-4511 MI0016877
(SEQ ID NO: 1999)
AAAAAAAAGGGAAAGAAGAACUGUUGCAUUUGCCCUGCACUCAGUUUGCACAGGGUAAAUGCAAUAGUUCUUCUUUC
CCUUUUUUUA
>hsa-mir-4512 MI0016878
(SEQ ID NO: 2000)
CUCAGCCCGGGCAAUAUAGUGAGACCUCGUCUCUACAAAAAAUUGAGACAGGGCCUCACUGUAUCGCCCAGGCUGGA
>hsa-mir-4513 MI0016879
(SEQ ID NO: 2001)
AUUCUAGGUGGGGAGACUGACGGCUGGAGGCCCAUAAGCUGUCUAAAACUUCGGCCCCCAGAUUUCUGGUCUCCCCA
CUUCAGAAC
>hsa-mir-4514 MI0016880
(SEQ ID NO: 2002)
GUUGAGACAGGCAGGAUUGGGGAAACAUCUUUUACCUCGUCUCUUGCCUGUUUUAGA
>hsa-mir-4515 MI0016881
(SEQ ID NO: 2003)
GCGGGAGGUGUAACAGGACUGGACUCCCGGCAGCCCCAGGGCAGGGGCGUGGGGAGCUGGUCCUAGCUCAGCGCUCC
CGGA
>hsa-mir-4516 MI0016882
(SEQ ID NO: 2004)
AGGGAGAAGGGUCGGGGCAGGGAGGGCAGGGCAGGCUCUGGGGUGGGGGGUCUGUGAGUCAGCCACGGCUCUGCCCA
CGUCUCCCC
>hsa-mir-4517 MI0016883
(SEQ ID NO: 2005)
AGGUAAAUAUGAUGAAACUCACAGCUGAGGAGCUUAGCAAGUAGCUAAGGCCAGAGCUUGUGUUUGGGUGGUGUGGC
UG
>hsa-mir-4518 MI0016884
(SEQ ID NO: 2006)
UGGGGGAAAAGUGCUGGGAUUGAUUAGUGAUGUCUGCUGGGGAACCGGGGCUCAGGGAUGAUAACUGUGCUGAGAAG
CCCCCU
>hsa-mir-4519 MI0016885
(SEQ ID NO: 2007)
AACCUCAGCAGUGCGCAGGGCUGCACUGUCUCCGUCUGCGGCCUGCAGUAAGCGGGUA
>hsa-mir-4520a MI0016886
(SEQ ID NO: 2008)
GUGUGCCACCUGCGUGUUUUCUGUCCAAAUCAGAAAAGGAUUUGGACAGAAAACACGCAGGAAGAAGGAA
>hsa-mir-4520b MI0017358
(SEQ ID NO: 2009)
CCUGCGUGUUUUCUGUCCAAAUCCUUUUCUGAUUUGGACAGAAAACACGCAGGU
>hsa-mir-4521 MI0016887
(SEQ ID NO: 2010)
UCGGCUAAGGAAGUCCUGUGCUCAGUUUUGUAGCAUCAAAACUAGGAUUUCUCUUGUUAC
>hsa-mir-4522 MI0016889
(SEQ ID NO: 2011)
GCGGGCGUUGCCUGGGGGCCUCGCAGGGGGAGAUCCAGCCCAGGCUGGUUCCGCUGACUCUGCCUGUAGGCCGGUGG
CGUCUUCUGG
>hsa-mir-4523 MI0016890
(SEQ ID NO: 2012)
GCGGGGGACCGAGAGGGCCUCGGCUGUGUGAGGACUAGAGGCGGCCGAGGCCCGGGCCGGUUCCCCCGA
>hsa-mir-4524a MI0016891
(SEQ ID NO: 2013)
GAACGAUAGCAGCAUGAACCUGUCUCACUGCAGAAUUAUUUUGAGACAGGCUUAUGCUGCUAUCCUUCA
>hsa-mir-4524b MI0019114
(SEQ ID NO: 2014)
UAGCUGGGUGGAUGUGUUCUUUUGAAGGAUAGCAGCAUAAGCCUGUCUCAAAAUAAUUCUGCAGUGAGACAGGUUCA
UGCUGCUAUCGUUCCAAAGAGGAAGGGUAAUCACUGUC
>hsa-mir-4525 MI0016892
(SEQ ID NO: 2015)
GUCAGAGGGGGGAUGUGCAUGCUGGUUGGGGUGGGCUGCCUGUGGACCAAUCAGCGUGCACUUCCCCACCCUGAA
>hsa-mir-4526 MI0016893
(SEQ ID NO: 2016)
UGCGGUGACAUCAGGGCCCAGUCCCUGCUGUCAUGCCCCAGGUGACGUGCUGGGCUGACAGCAGGGCUGGCCGCUAA
CGUCACUGUC
>hsa-mir-4527 MI0016894
(SEQ ID NO: 2017)
CCAGAAGUGGUCUGCAAAGAGAUGACUGUGAAUCCAAGAUCCACAUCAGCUCUGUGCUGCCUACAUCUGA
>hsa-mir-4528 MI0016895
(SEQ ID NO: 2018)
UAUUCUACUGAGAGUACAGAUCUUUAUAUAUAUGAUCAUUAUAUGUAUGAUGAGAUCAUUAUAUGUAUGAUCUGGAC
ACCCAGUAGAAUC
>hsa-mir-4529 MI0016896
(SEQ ID NO: 2019)
AUGACAGGCCAUCAGCAGUCCAAUGAAGACAUGAAGACCCAAUGUCUUCAUUGGACUGCUGAUGGCCCGUCACUGGGA
>hsa-mir-4530 MI0016897
(SEQ ID NO: 2020)
CGACCGCACCCGCCCGAAGCUGGGUCAAGGAGCCCAGCAGGACGGGAGCGCGGCGC
>hsa-mir-4531 MI0016898
(SEQ ID NO: 2021)
GCCUAGGAGUCCUUGGUCAGUGGGGACAUGGAGAAGGCUUCUGAGGA
>hsa-mir-4532 MI0016899
(SEQ ID NO: 2022)
ACAGACCCCGGGGAGCCCGGCGGUGAAGCUCCUGGUAUCCUGGGUGUCUGA
>hsa-mir-4533 MI0016900
(SEQ ID NO: 2023)
UGAGAAUGUGGAAGGAGGUUGCCGGACGCUGCUGGCUGCCUUCCAGCGUCCACUUCCCUUUCUCUCUCUCC
>hsa-mir-4534 MI0016901
(SEQ ID NO: 2024)
UGUGAAUGACCCCCUUCCAGAGCCAAAAUCACCAGGGAUGGAGGAGGGGUCUUGGGUACU
>hsa-mir-4535 MI0016903
(SEQ ID NO: 2025)
AACUGGGUCCCAGUCUUCACAGUUGGUUUCUGACACGUGGACCUGGCUGGGACGAUGUG
>hsa-mir-4536-1 MI0016906
(SEQ ID NO: 2026)
AUGUGGUAGAUAUAUGCACGAUAUAUAUACUGCCCUGCUUUUAUACAUACAUACAUACAUACCUAUAUCGUGCAUAU
AUCUACCACAU
>hsa-mir-4536-2 MI0019149
(SEQ ID NO: 2027)
AUGUGGUAGAUAUAUGCACGAUAUAGGUAUGUAUGUAUGUAUGUAUAAAAGCAGGGCAGUAUAUAUAUCGUGCAUAU
AUCUACCACAU
>hsa-mir-4537 MI0016908
(SEQ ID NO: 2028)
UGAGCCGAGCUGAGCUUAGCUGGGCUGAGCUAACCAGGGCUGGGCUGAGCUGGGCUGAGCUGAGCUGAGC
>hsa-mir-4538 MI0016909
(SEQ ID NO: 2029)
GAGCUUGGAUGAGCUGGGCUGAACUGGGCUGGGUUGAGCUGGGCUGGGCUGAGUUGAGCCAGGCUGAUCUGGGCUGAG
>hsa-mir-4539 MI0016910
(SEQ ID NO: 2030)
UGAGCUGGGCUCUGCUGUGCUGUGCUGAGCAGGGCUGAGCUGAACUGGGCUGAGCUGGGC
>hsa-mir-4540 MI0016911
(SEQ ID NO: 2031)
AAGCUGCAUGGACCAGGACUUGGCACCUUUGGCCUUAGUCCUGCCUGUAGGUUUA
>hsa-mir-4632 MI0017259
(SEQ ID NO: 2032)
GAGGGCAGCGUGGGUGUGGCGGAGGCAGGCGUGACCGUUUGCCGCCCUCUCGCUGCUCUAG
>hsa-mir-4633 MI0017260
(SEQ ID NO: 2033)
UGGCAAGUCUCCGCAUAUGCCUGGCUAGCUCCUCCACAAAUGCGUGUGGAGGAGCUAGCCAGGCAUAUGCAGAGCGU
CA
>hsa-mir-4634 MI0017261
(SEQ ID NO: 2034)
GGACAAGGGCGGCGCGACCGGCCCGGGGCUCUUGGGCGGCCGCGUUUCCCCUCC
>hsa-mir-4635 MI0017262
(SEQ ID NO: 2035)
CCGGGACUUUGUGGGUUCUGACCCCACUUGGAUCACGCCGACAACACUGGUCUUGAAGUCAGAACCCGCAAAGUCCU
GG
>hsa-mir-4636 MI0017263
(SEQ ID NO: 2036)
UAGAUUCAGAACUCGUGUUCAAAGCCUUUAGCCCAGCAAUGGGAGAGUGCUAAAGGCUUCAAGCACGAGUUCUGAAU
CUA
>hsa-mir-4637 MI0017264
(SEQ ID NO: 2037)
CCCUUACUUGGAUCUGCAAUUAGUAUUUUAAUCAUAGAUUGUAUUUAGUUAGUUUUUAAUACUAACUGCAGAUUCAA
GUGAGGG
>hsa-mir-4638 MI0017265
(SEQ ID NO: 2038)
GACUCGGCUGCGGUGGACAAGUCCGGCUCCAGAACCUGGACACCGCUCAGCCGGCCGCGGCAGGGGUC
>hsa-mir-4639 MI0017266
(SEQ ID NO: 2039)
UUGCUAAGUAGGCUGAGAUUGAUGUCAGGUUAUCCCCAAGCAUAACCUCACUCUCACCUUGCUUUGCAG
>hsa-mir-4640 MI0017267
(SEQ ID NO: 2040)
CUGUGGGCUGGGCCAGGGAGCAGCUGGUGGGUGGGAAGUAAGAUCUGACCUGGACUCCAUCCCACCCACCCCCUGUU
UCCUGGCCCACAG
>hsa-mir-4641 MI0017268
(SEQ ID NO: 2041)
GGGGGGCAGGGGGCAGAGGGCAUCAGAGGACAGCCGCCUGGUGCCCAUGCCAUACUUUUGCCUCAG
>hsa-mir-4642 MI0017269
(SEQ ID NO: 2042)
CACAACUGCAUGGCAUCGUCCCCUGGUGGCUGUGGCCUAGGGCAAGCCACAAAGCCACUCAGUGAUGAUGCCAGCAG
UUGUG
>hsa-mir-4643 MI0017270
(SEQ ID NO: 2043)
GUGUGCCCUAGCAUUUAUAAUCAUGUGUUCAUUCACAUGAUCAUAAGUGGACACAUGACCAUAAAUGCUAAAGCACAC
>hsa-mir-4644 MI0017271
(SEQ ID NO: 2044)
GCGGCGGUGCUCUGCCUCUUUCUCCAUCCACCCUGGUCCAGGUCCACAGCAGUGGAGAGAGAAAAGAGACAGAAGGA
UGGCCGU
>hsa-mir-4645 MI0017272
(SEQ ID NO: 2045)
UGAUAGGGAAACCAGGCAAGAAAUAUUGUCUCCUCAAGUUGCGACGAGACAGUAGUUCUUGCCUGGUUUCUCUAUCA
>hsa-mir-4646 MI0017273
(SEQ ID NO: 2046)
ACUGGGAAGAGGAGCUGAGGGACAUUGCGGAGAGGGUCUCACAUUGUCCCUCUCCCUUCCCAG
>hsa-mir-4647 MI0017274
(SEQ ID NO: 2047)
CCAGGAGGGUGAAGAUGGUGCUGUGCUGAGGAAAGGGGAUGCAGAGCCCUGCCCAGCACCACCACCUCCUAUGCUCC
UGG
>hsa-mir-4648 MI0017275
(SEQ ID NO: 2048)
UGUGGGACUGCAAAUGGGAGCUCAGCACCUGCCUGCCACCCACGCAGACCAGCCCCUGCUCUGUUCCCACAG
>hsa-mir-4649 MI0017276
(SEQ ID NO: 2049)
UCUGGGCGAGGGGUGGGCUCUCAGAGGGGCUGGCAGUACUGCUCUGAGGCCUGCCUCUCCCCAG
>hsa-mir-4650-1 MI0017277
(SEQ ID NO: 2050)
UUCUGUAGAGAUUAUCAGGCCUCUUUCUACCUUCCAAGGCUCAGAAGGUAGAAUGAGGCCUGACAUAUCUGCAGGA
>hsa-mir-4650-2 MI0017278
(SEQ ID NO: 2051)
UUCUGUAGAGAUUAUCAGGCCUCUUUCUACCUUCCAAGGCUCAGAAGGUAGAAUGAGGCCUGACAUAUCUGCAGGA
>hsa-mir-4651 MI0017279
(SEQ ID NO: 2052)
CGGCGACGGCGGGGUGGGUGAGGUCGGGCCCCAAGACUCGGGGUUUGCCGGGCGCCUCAGUUCACCGCGGCCG
>hsa-mir-4652 MI0017280
(SEQ ID NO: 2053)
UAUUGGACGAGGGGACUGGUUAAUAGAACUAACUAACCAGAACUAUUUUGUUCUGUUAACCCAUCCCCUCAUCUAAUA
>hsa-mir-4653 MI0017281
(SEQ ID NO: 2054)
UUGUCCAAUUCUCUGAGCAAGGCUUAACACCAAAGGGUUAAGGGUUUGCUCUGGAGUUAAGGGUUGCUUGGAGAAUU
GGAGAA
>hsa-mir-4654 MI0017282
(SEQ ID NO: 2055)
CUGGCUGGUUGUGGGAUCUGGAGGCAUCUGGGGUUGGAAUGUGACCCCAGUCUCCUUUUCCCUCAUCAUCUGCCAG
>hsa-mir-4655 MI0017283
(SEQ ID NO: 2056)
CCAAGGGCACACCGGGGAUGGCAGAGGGUCGUGGGAAAGUGUUGACCCUCGUCAGGUCCCCGGGGAGCCCCUGG
>hsa-mir-4656 MI0017284
(SEQ ID NO: 2057)
AGGCUGGCGUGGGCUGAGGGCAGGAGGCCUGUGGCCGGUCCCAGGCCUCCUGCUUCCUGGGCUCAGGCUCGGUUU
>hsa-mir-4657 MI0017285
(SEQ ID NO: 2058)
AAUGUGGAAGUGGUCUGAGGCAUAUAGAGUAUAUGCCAAGAACACUACCAUAU
>hsa-mir-4658 MI0017286
(SEQ ID NO: 2059)
GCUGCCCUUCACUCAGAGCAUCUACACCCACUACCGGUGAGUGUGGAUCCUGGAGGAAUCGUGGC
>hsa-mir-4659a MI0017287
(SEQ ID NO: 2060)
GAAACUGCUGAAGCUGCCAUGUCUAAGAAGAAAACUUUGGAGAAAAAUUUUCUUCUUAGACAUGGCAACGUCAACAG
UUUC
>hsa-mir-4659b MI0017291
(SEQ ID NO: 2061)
CUGUUGACGUUGCCAUGUCUAAGAAGAAAAUUUUUCUCCAAAGUUUUCUUCUUAGACAUGGCAGCUUCAGCAG
>hsa-mir-4660 MI0017288
(SEQ ID NO: 2062)
ACUCCUUCUGCAGCUCUGGUGGAAAAUGGAGAAGACUUUUCCUUUCCUCCAUCUCCCCCAGGGCCUGGUGGAGU
>hsa-mir-4661 MI0017289
(SEQ ID NO: 2063)
UUUACUCUGAACUAGCUCUGUGGAUCCUGACAGACAGCCUGAUAGACAGGAUCCACAGAGCUAGUCCAGAGUAAA
>hsa-mir-4662a MI0017290
(SEQ ID NO: 2064)
UCUAUUUAGCCAAUUGUCCAUCUUUAGCUAUUCUGAAUGCCUAAAGAUAGACAAUUGGCUAAAUAGA
>hsa-mir-4662b MI0017293
(SEQ ID NO: 2065)
CACAAUUUCUAUUUAGCCAAUUGUCUAUCUUUAGGCAUUCAGAAUAGCUAAAGAUGGACAAUUGGCUAAAUAGACAC
UGUG
>hsa-mir-4663 MI0017292
(SEQ ID NO: 2066)
CUGUGGUGGAGCUGAGCUCCAUGGACGUGCAGUGGCAUCUGUCAUUGCUGCCUUCCUGGAGCUCAGGCCCUUGCAG
>hsa-mir-4664 MI0017294
(SEQ ID NO: 2067)
GUUGGGGGCUGGGGUGCCCACUCCGCAAGUUAUCACUGAGCGACUUCCGGUCUGUGAGCCCCGUCCUCCGC
>hsa-mir-4665 MI0017295
(SEQ ID NO: 2068)
CUCGAGGUGCUGGGGGACGCGUGAGCGCGAGCCGCUUCCUCACGGCUCGGCCGCGGCGCGUAGCCCCCGCCACAUCG
GG
>hsa-mir-4666a MI0017296
(SEQ ID NO: 2069)
AUCACUUAAAUACAUGUCAGAUUGUAUGCCUACAAAAUCCCUCCAGACUGGCAUACAAUCUGACAUGUAUUUAAGAG
AU
>hsa-mir-4666b MI0019299
(SEQ ID NO: 2070)
UGUCUAAAUUGCAUGUCAGAUUGUAAUUCCCAGGCCCUUCCUCCAAUACUGGGAAUUACAAUUUGACAUGCAAUUUA
GACA
>hsa-mir-4667 MI0017297
(SEQ ID NO: 2071)
UGACUGGGGAGCAGAAGGAGAACCCAAGAAAAGCUGACUUGGAGGUCCCUCCUUCUGUCCCCACAG
>hsa-mir-4668 MI0017298
(SEQ ID NO: 2072)
AGGGAAAAAAAAAAGGAUUUGUCUUGUAGCCAGGAUAUUGUUUUAAAGAAAAUCCUUUUUGUUUUUCCAG
>hsa-mir-4669 MI0017300
(SEQ ID NO: 2073)
GCCUCCCUUCACUUCCUGGCCAUCCAGGCAUCUGUGUCUGUGUCCGGGAAGUGGAGGAGGGC
>hsa-mir-4670 MI0017301
(SEQ ID NO: 2074)
CUCUAGGAAGCGACCAUGAUGUAACUUCACAGACUCUCCAAAAGUCUGAAGUUACAUCAUGGUCGCUUCCUAGAG
>hsa-mir-4671 MI0017302
(SEQ ID NO: 2075)
UAUUUUAAGACCGAAGACUGUGCGCUAAUCUCUUAGCACUGAAGAUUAGUGCAUAGUCUUUGGUCUCAAAAUA
>hsa-mir-4672 MI0017303
(SEQ ID NO: 2076)
GGCUGCUUCUCGCCUCUGUCCAGCUGUGUGGCCUUGGACAAGCCUCUUGGUUACACAGCUGGACAGAGGCACGAAAC
AGCC
>hsa-mir-4673 MI0017304
(SEQ ID NO: 2077)
GUCCAGGCAGGAGCCGGACUGGACCUCAGGGAAGAGGCUGACCCGGCCCCUCUUGCGGC
>hsa-mir-4674 MI0017305
(SEQ ID NO: 2078)
CCCAGGCGCCCGCUCCCGACCCACGCCGCGCCGCCGGGUCCCUCCUCCCCGGAGAGGCUGGGCUCGGGACGCGCGGC
UCAGCUCGGG
>hsa-mir-4675 MI0017306
(SEQ ID NO: 2079)
CAUGAGAAAUCCUGCUGGUCAACCAUAGCCCUGGUCAGACUCUCCGGGGCUGUGAUUGACCAGCAGGACUUCUCAUG
>hsa-mir-4676 MI0017307
(SEQ ID NO: 2080)
UGAAUGAAAGAGCCAGUGGUGAGACAGUGAGUUGAUUACUUCUCACUGUUUCACCACUGGCUCUUUGGUUCA
>hsa-mir-4677 MI0017308
(SEQ ID NO: 2081)
GCAAAGCAGCAAUUGUUCUUUGGUCUUUCAGCCAUGACCUGACCUUCUGUCUGUGAGACCAAAGAACUACUUUGCUU
GGC
>hsa-mir-4678 MI0017309
(SEQ ID NO: 2082)
GGAAAAAACAAGGUAUUGUUCAGACUUAUGAUUUUUGGGGUCAAAGAUUCUGAGCAAUAACCUAUUAAAAAACC
>hsa-mir-4679-1 MI0017310
(SEQ ID NO: 2083)
GUCUUUUUUCUGUGAUAGAGAUUCUUUGCUUUGUUAGAAACAAAAAGCAAAGAAUCUCUAUCACAGAAAAAAGAU
>hsa-mir-4679-2 MI0017311
(SEQ ID NO: 2084)
UAUCUUUUUUCUGUGAUAGAGAUUCUUUGCUUUUUGUUUCUAACAAAGCAAAGAAUCUCUAUCACAGAAAAAAGACG
>hsa-mir-4680 MI0017312
(SEQ ID NO: 2085)
UAUAAGAACUCUUGCAGUCUUAGAUGUUAUAAAAAUAUAUAUCUGAAUUGUAAGAGUUGUUAGCAC
>hsa-mir-4681 MI0017313
(SEQ ID NO: 2086)
GGCAACGGGAAUGCAGGCUGUAUCUGCAGGGCAUUGUGCUAACAGGUGCAGGCUGCAGACCUGUCACAGGCC
>hsa-mir-4682 MI0017314
(SEQ ID NO: 2087)
UGCCCCUGGUCUGAGUUCCUGGAGCCUGGUCUGUCACUGGGGAAGUCCAGAGCUCCAAGGCUCAGUGCCCAGGGGAC
GCA
>hsa-mir-4683 MI0017315
(SEQ ID NO: 2088)
GACACGCAAGACGAGGCGGGCCUGGAGGUGCACCAGUUCUGGCCGCUGGUGGAGAUCCAGUGCUCGCCCGAUCUCAA
GUUC
>hsa-mir-4684 MI0017316
(SEQ ID NO: 2089)
GCACCAGGGGUACCUCUCUACUGACUUGCAACAUACAUUUGUCUUGGUGUGUUGCAAGUCGGUGGAGACGUACCCUU
GGUGC
>hsa-mir-4685 MI0017317
(SEQ ID NO: 2090)
UAGCCCAGGGCUUGGAGUGGGGCAAGGUUGUUGGUGAUAUGGCUUCCUCUCCCUUCCUGCCCUGGCUAG
>hsa-mir-4686 MI0017318
(SEQ ID NO: 2091)
GGCUUCCUGUAUCUGCUGGGCUUUCUGGUGUUGGCAGCCCAAGAUGACACCCUGGGCCCAGCAGGAGCCAGAAGCC
>hsa-mir-4687 MI0017319
(SEQ ID NO: 2092)
ACCUGAGGAGCCAGCCCUCCUCCCGCACCCAAACUUGGAGCACUUGACCUUUGGCUGUUGGAGGGGGCAGGCUCGCG
GGU
>hsa-mir-4688 MI0017321
(SEQ ID NO: 2093)
GUCUACUCCCAGGGUGCCAAGCUGUUUCGUGUUCCCUCCCUAGGGGAUCCCAGGUAGGGGCAGCAGAGGACCUGGGC
CUGGAC
>hsa-mir-4689 MI0017322
(SEQ ID NO: 2094)
GGUUUCUCCUUGAGGAGACAUGGUGGGGGCCGGUCAGGCAGCCCAUGCCAUGUGUCCUCAUGGAGAGGCC
>hsa-mir-4690 MI0017323
(SEQ ID NO: 2095)
GAGCAGGCGAGGCUGGGCUGAACCCGUGGGUGAGGAGUGCAGCCCAGCUGAGGCCUCUGC
>hsa-mir-4691 MI0017324
(SEQ ID NO: 2096)
GGAGCACUCCCAGGUCCUCCAGGCCAUGAGCUGCGGCCCUGAUGUCUCUACUCCAGCCACGGACUGAGAGUGCAUAG
GAGUGUCC
>hsa-mir-4692 MI0017325
(SEQ ID NO: 2097)
GUUUUACUUGAUACCCACACUGCCUGGGUGGGACACUCAGGCAGUGUGGGUAUCAGAUAAAAC
>hsa-mir-4693 MI0017326
(SEQ ID NO: 2098)
GUUUAAAGAAUACUGUGAAUUUCACUGUCACAAAUUCAAAUAAAGUGAGAGUGGAAUUCACAGUAUUUAAGGAAU
>hsa-mir-4694 MI0017327
(SEQ ID NO: 2099)
CAAAUACAUAGGUGUUAUCCUAUCCAUUUGCCUCUCUCAGAAAAUAGAGUCAAAUGGACAGGAUAACACCUAUGUAU
UUG
>hsa-mir-4695 MI0017328
(SEQ ID NO: 2100)
CCUGCAGGAGGCAGUGGGCGAGCAGGCGGGGCAGCCCAAUGCCAUGGGCCUGAUCUCACCGCUGCCUCCUUCCC
>hsa-mir-4696 MI0017329
(SEQ ID NO: 2101)
CAAAGCCACUGCAAGACGGAUACUGUCAUCUAUUCCAGAAGAUGACAAUGUCCAUUUUGCAGUGGCUUUG
>hsa-mir-4697 MI0017330
(SEQ ID NO: 2102)
GGGCCCAGAAGGGGGCGCAGUCACUGACGUGAAGGGACCACAUCCCGCUUCAUGUCAGUGACUCCUGCCCCUUGGUCU
>hsa-mir-4698 MI0017331
(SEQ ID NO: 2103)
UGCUUCUCCUGGGGUCUUCCUCUACAUUUCCACCUAGACGGGCCUGGGUCAAAAUGUAGAGGAAGACCCCAGAAGGA
GCA
>hsa-mir-4699 MI0017332
(SEQ ID NO: 2104)
AGCAAUUGGAGAAGAUUGCAGAGUAAGUUCCUGAUUAAGAAAUGGAAUUUACUCUGCAAUCUUCUCCAAUUGCU
>hsa-mir-4700 MI0017333
(SEQ ID NO: 2105)
UCAGUGAGGUCUGGGGAUGAGGACAGUGUGUCCUGAAAUUCACAGGACUGACUCCUCACCCCAGUGCACGAGGA
>hsa-mir-4701 MI0017334
(SEQ ID NO: 2106)
CCUUGGCCACCACACCUACCCCUUGUGAAUGUCGGGCAAUGGGUGAUGGGUGUGGUGUCCACA
>hsa-mir-4703 MI0017336
(SEQ ID NO: 2107)
UUAUGCAUAUUAGCAAUACAGUACAAAUAUAGUGUGUUUGAUUUGCACUGUAGUUGUAUUGUAUUGCCACUCUGUAU
AA
>hsa-mir-4704 MI0017337
(SEQ ID NO: 2108)
CUUAUCCUAGACACUAGGCAUGUGAGUGAUUGUCUUCCUCACUCAAUCAGUCACAUAUCUAGUGUCUAGAAUGAG
>hsa-mir-4705 MI0017338
(SEQ ID NO: 2109)
CUCACAAGAUCAAUCACUUGGUAAUUGCUGUGAUAACAACUCAGCAAUUACCAAGUGAUUGGUUUUGUGAG
>hsa-mir-4706 MI0017339
(SEQ ID NO: 2110)
GCUACGGGGAGCGGGGAGGAAGUGGGCGCUGCUUCUGCGUUAUCUGGAAGGAGCAGCCCACUCCUGUCCUGGGCUCU
GUGGU
>hsa-mir-4707 MI0017340
(SEQ ID NO: 2111)
GGUUCCGGAGCCCCGGCGCGGGCGGGUUCUGGGGUGUAGACGCUGCUGGCCAGCCCGCCCCAGCCGAGGUUCUCGGC
ACC
>hsa-mir-4708 MI0017341
(SEQ ID NO: 2112)
UUUAGGAGAGAGAUGCCGCCUUGCUCCUUGAACAGGAGGAGCAAGGCGGCAUCUCUCUGAUACUAAA
>hsa-mir-4709 MI0017342
(SEQ ID NO: 2113)
CUGCUUCAACAACAGUGACUUGCUCUCCAAUGGUAUCCAGUGAUUCGUUGAAGAGGAGGUGCUCUGUAGCAG
>hsa-mir-4710 MI0017344
(SEQ ID NO: 2114)
GACCGAGUGGGGUGAGGGCAGGUGGUUCUUCCCGAAGCAGCUCUCGCCUCUUCGUC
>hsa-mir-4711 MI0017345
(SEQ ID NO: 2115)
AAAUGUGCAUCAGGCCAGAAGACAUGAGCCCUUUGGAAAGGUCUCGUGUCUUCUGGCUUGAUGCACAUUU
>hsa-mir-4712 MI0017346
(SEQ ID NO: 2116)
GACAGGAUUCCAGUACAGGUCUCUCAUUUCCUUCAUGAUUAGGAAUACUACUUUGAAAUGAGAGACCUGUACUGUAU
CUGUU
>hsa-mir-4713 MI0017347
(SEQ ID NO: 2117)
GUCCCCAUUUUUCUCCCACUACCAGGCUCCCAUAAGGGUCGAAUGGGAUCCAGACAGUGGGAGAAAAAUGGGGAC
>hsa-mir-4714 MI0017348
(SEQ ID NO: 2118)
AUUUUGGCCAACUCUGACCCCUUAGGUUGAUGUCAGAAUGAGGUGUACCAACCUAGGUGGUCAGAGUUGGCCAAAAU
>hsa-mir-4715 MI0017349
(SEQ ID NO: 2119)
GGGGAAUGAAAGUUGGCUGCAGUUAAGGUGGCUAAUCAGCUGAUGGUGCCACCUUAACUGCAGCCAAUUCUAAUUCC
CC
>hsa-mir-4716 MI0017350
(SEQ ID NO: 2120)
CAUACUUUGUCUCCAUGUUUCCUUCCCCCUUCUGUAUACAUGUAUACAGGAGGAAGGGGGAAGGAAACAUGGAGACA
AAGUGUG
>hsa-mir-4717 MI0017352
(SEQ ID NO: 2121)
GGCAGUGUUUAGGCCACAGCCACCCAUGUGUAGGGGUGGCUACACAUGGGUGGCUGUGGCCUAAACACUGCC
>hsa-mir-4718 MI0017353
(SEQ ID NO: 2122)
AGCUGUACCUGAAACCAAGCACCUGUUUGUGACUUGGCUUCAGUUACUAGC
>hsa-mir-4719 MI0017354
(SEQ ID NO: 2123)
ACAAUGAUGACUUGUAUGUUAUAGAUUUGUGAUUACAUUAAAACUUAAAAUUUCACAAAUCUAUAAUAUGCAGGUCA
UCACUGU
>hsa-mir-4720 MI0017355
(SEQ ID NO: 2124)
AAGCCUGGCAUAUUUGGUAUAACUUAAGCACCAGGUAAAAUCUGGUGCUUAAGUUGUACCAAGUAUAGCCAAGUUU
>hsa-mir-4721 MI0017356
(SEQ ID NO: 2125)
GGGCCUGGUCAUGGUCAAGCCAGGUUCCAUCAAGCCCCACCAGAAGGUGGAGGCCCAGGUGAGGGCUCCAGGUGACG
GUGGGCAGGGUU
>hsa-mir-4722 MI0017357
(SEQ ID NO: 2126)
GGCAGGAGGGCUGUGCCAGGUUGGCUGGGCCAGGCCUGACCUGCCAGCACCUCCCUGCAG
>hsa-mir-4723 MI0017359
(SEQ ID NO: 2127)
AGUUGGUGGGGGAGCCAUGAGAUAAGAGCACCUCCUAGAGAAUGUUGAACUAAAGGUGCCCUCUCUGGCUCCUCCCC
AAAG
>hsa-mir-4724 MI0017361
(SEQ ID NO: 2128)
ACGCAAAAUGAACUGAACCAGGAGUGAGCUUCGUGUACAUUAUCUAUUAGAAAAUGAAGUACCUUCUGGUUCAGCUA
GUCCCUGUGCGU
>hsa-mir-4725 MI0017362
(SEQ ID NO: 2129)
GUGUCUCUCUGGAGACCCUGCAGCCUUCCCACCCACCAGGGAGCUUUCCAUGGGCUGUGGGGAAGGCGUCAGUGUCG
GGUGAGGGAACAC
>hsa-mir-4726 MI0017363
(SEQ ID NO: 2130)
AGGGCCAGAGGAGCCUGGAGUGGUCGGGUCGACUGAACCCAGGUUCCCUCUGGCCGCA
>hsa-mir-4727 MI0017364
(SEQ ID NO: 2131)
AAUCUGCCAGCUUCCACAGUGGCAGAUUUUCCCAUAGUGGGAAGCUGGCAGAUUC
>hsa-mir-4728 MI0017365
(SEQ ID NO: 2132)
GUGGGAGGGGAGAGGCAGCAAGCACACAGGGCCUGGGACUAGCAUGCUGACCUCCCUCCUGCCCCAG
>hsa-mir-4729 MI0017366
(SEQ ID NO: 2133)
UCUGUUUCCUCAUUUAUCUGUUGGGAAGCUAACUGUGACCUUAGCGUCCCAGCAGAUAAAUGAGGAAACAGA
>hsa-mir-4730 MI0017367
(SEQ ID NO: 2134)
CGCAGGCCUCUGGCGGAGCCCAUUCCAUGCCAGAUGCUGAGCGAUGGCUGGUGUGUGCUGCUCCACAGGCCUGGUG
>hsa-mir-4731 MI0017368
(SEQ ID NO: 2135)
CCCUGCCAGUGCUGGGGGCCACAUGAGUGUGCAGUCAUCCACACACAAGUGGCCCCCAACACUGGCAGGG
>hsa-mir-4732 MI0017369
(SEQ ID NO: 2136)
GAGGGAGCUGUAGAGCAGGGAGCAGGAAGCUGUGUGUGUCCAGCCCUGACCUGUCCUGUUCUGCCCCCAGCCCCUC
>hsa-mir-4733 MI0017370
(SEQ ID NO: 2137)
GGUCGCUUAAAUCCCAAUGCUAGACCCGGUGGCAAUCAAGGUCUAGCCACCAGGUCUAGCAUUGGGAUUUAAGCCC
>hsa-mir-4734 MI0017371
(SEQ ID NO: 2138)
CUCGGGCCCGACCGCGCCGGCCCGCACCUCCCGGCCCGGAGCUGCGGGCUGCGGUCAGGGCGAUCCCGGG
>hsa-mir-4735 MI0017372
(SEQ ID NO: 2139)
UGCAGUGCCUAAUUUGAACACCUUCGGUAUUCAUCAAAAAUACCAAAGGUGCUCAAAUUAGACAUUGCA
>hsa-mir-4736 MI0017373
(SEQ ID NO: 2140)
AGGCAGGUUAUCUGGGCUGCCAUCUCCCACUGGCUGCUUGCCUGCCU
>hsa-mir-4737 MI0017374
(SEQ ID NO: 2141)
CUGCACAGGAUGCGAGGAUGCUGACAGUGCCUCACAGCCGCACAGGACCGAGGAUGCUGACGGUGCCUCACAGCCAC
ACAG
>hsa-mir-4738 MI0017376
(SEQ ID NO: 2142)
GGUCGCAUUUCUCCUUCUUACCAGCGCGUUUUCAGUUUCAUAGGGAAGCCUUUCCAUGAAACUGGAGCGCCUGGAGG
AGAAGGGGCC
>hsa-mir-4739 MI0017377
(SEQ ID NO: 2143)
GGGAGGAAGAAGGGAGGAGGAGCGGAGGGGCCCUUGUCUUCCCAGAGCCUCUCCCUUCCUCCCCUCCCCCUCCC
>hsa-mir-4740 MI0017378
(SEQ ID NO: 2144)
GCCAAGGACUGAUCCUCUCGGGCAGGGAGUCAGAGGGGACCGCCCGAGAGGAUCCGUCCCUGC
>hsa-mir-4741 MI0017379
(SEQ ID NO: 2145)
CGGGCGGGGCGGGUCCGGCCGCCUCCGAGCCCGGCCGGCAGCCCCCGGCCUUAAAGCGCGGGCUGUCCGGAGGGGUC
GGCUUUCCCACCG
>hsa-mir-4742 MI0017380
(SEQ ID NO: 2146)
UCAGGCAAAGGGAUAUUUACAGAUACUUUUUAAAAUUUGUUUGAGUUGAGGCAGAUUAAAUAUCUGUAUUCUCCUUU
GCCUGCAG
>hsa-mir-4743 MI0017381
(SEQ ID NO: 2147)
GCUGGCCGGAUGGGACAGGAGGCAUGAAUGAGCCAUCUUUCCAAUGCCUUUCUGUCUUUUCUGGUCCAG
>hsa-mir-4744 MI0017382
(SEQ ID NO: 2148)
GUAAUCACAUCUAAAGACUAGACUUCGCUAUGACCAGGCCAUAGUAAACAUCAUAGUAUGUCUAGUCUUUAGGUUUG
AUUAC
>hsa-mir-4745 MI0017384
(SEQ ID NO: 2149)
GUGAGUGGGGCUCCCGGGACGGCGCCCGCCCUGGCCCUGGCCCGGCGACGUCUCACGGUCCC
>hsa-mir-4746 MI0017385
(SEQ ID NO: 2150)
GUGUCUGUGCCGGUCCCAGGAGAACCUGCAGAGGCAUCGGGUCAGCGGUGCUCCUGCGGGCCGACACUCAC
>hsa-mir-4747 MI0017386
(SEQ ID NO: 2151)
AGGGAAGGAGGCUUGGUCUUAGCACGGGGUCUAAGGCCCGGGCUUUCCUCCCAG
>hsa-mir-4748 MI0017387
(SEQ ID NO: 2152)
UGGCUGGCUGAGGUUUGGGGAGGAUUUGCUGGUGCUAGAGAGGAAAGCAGACCCUACCCAACCCCACGCCCUACUAC
AGCCA
>hsa-mir-4749 MI0017388
(SEQ ID NO: 2153)
CCUGCGGGGACAGGCCAGGGCAUCUAGGCUGUGCACAGUGACGCCCCUCCUGCCCCCACAG
>hsa-mir-4750 MI0017389
(SEQ ID NO: 2154)
CGCUCGGGCGGAGGUGGUUGAGUGCCGACUGGCGCCUGACCCACCCCCUCCCGCAG
>hsa-mir-4751 MI0017390
(SEQ ID NO: 2155)
CCCGGAGCCAGAGGACCCGUAGCUGCUAGAAGGGCAGGGGUGUGGCUUCUGGGGGCUGGUCUUCAGCUCUGGCG
>hsa-mir-4752 MI0017391
(SEQ ID NO: 2156)
AGUGUCUCCUUGUGGAUCUCAAGGAUGUGCUUCCACAUAGCAGCAUGUUCUUCAGAUGGACAAGGAGACACU
>hsa-mir-4753 MI0017392
(SEQ ID NO: 2157)
AUAUCUACACAAGGCCAAAGGAAGAGAACAGAUAUAUCCACAGUACACUUGGCUGUUCUCUUUCUUUAGCCUUGUGU
AGAUAU
>hsa-mir-4754 MI0017394
(SEQ ID NO: 2158)
ACGCGCCUGAUGCGGACCUGGGUUAGCGGAGUGAGGCCCAGUGGUCACCGCCGCCCUCCGCAGGUCCAGGUUGCCGU
GCGCAUGUGCCU
>hsa-mir-4755 MI0017395
(SEQ ID NO: 2159)
AGAUUCAGCUUUCCCUUCAGAGCCUGGCUUUGGCAUCUAUGAAAGCCAGGCUCUGAAGGGAAAGUUGAAUCU
>hsa-mir-4756 MI0017397
(SEQ ID NO: 2160)
GGGAUAAAAUGCAGGGAGGCGCUCACUCUCUGCUGCCGAUUCUGCACCAGAGAUGGUUGCCUUCCUAUAUUUUGUGUC
>hsa-mir-4757 MI0017398
(SEQ ID NO: 2161)
UUCCAGCCCGAGGCCUCUGUGACGUCACGGUGUCUGCGGGAGGAGACCAUGACGUCACAGAGGCUUCGCGCUCUGAG
>hsa-mir-4758 MI0017399
(SEQ ID NO: 2162)
GGUGAGUGGGAGCCGGUGGGGCUGGAGUAAGGGCACGCCCGGGGCUGCCCCACCUGCUGACCACCCUCCCC
>hsa-mir-4759 MI0017400
(SEQ ID NO: 2163)
CAUUUAGGACUAGAUGUUGGAAUUAGACAGAAAAAAGUUAGACACAAAAAAUUGUGUCUAAUUCCAACAUCUAGUCC
UAAAUG
>hsa-mir-4760 MI0017401
(SEQ ID NO: 2164)
GCCAUGGUGUUUAGAUUGAACAUGAAGUUAGAAUUCUUAAGUAUCAAAACUAAAUUCAUGUUCAAUCUAAACCCCAU
GGC
>hsa-mir-4761 MI0017402
(SEQ ID NO: 2165)
GGACAAGGUGUGCAUGCCUGACCCGUUGUCAGACCUGGAAAAAGGGCCGGCUGUGGGCAGGGAGGGCAUGCGCACUU
UGUCC
>hsa-mir-4762 MI0017403
(SEQ ID NO: 2166)
CUGAUACCCCAAAUCUUGAUCAGAAGCCUUGAUCAGAAGCUAGGAAGGCUUCUGAUCAAGAUUUGUGGUGUCAAG
>hsa-mir-4763 MI0017404
(SEQ ID NO: 2167)
CCUGUCCCUCCUGCCCUGCGCCUGCCCAGCCCUCCUGCUCUGGUGACUGAGGACCGCCAGGCAGGGGCUGGUGCUGG
GCGGGGGGCGGCGGG
>hsa-mir-4764 MI0017405
(SEQ ID NO: 2168)
UCUUCCCCAUGGAUGUGGAAGGAGUUAUCUGUCACCAGUCAGAUAACUGUCACCAGUCAGUUAACUCCUUUCACACC
CAUGGGGAAGA
>hsa-mir-4765 MI0017406
(SEQ ID NO: 2169)
UGGUGAUUUUGAACGUAGCUAUCCACCACUCAGCCUGGAAAAAGCUGAGUGAUUGAUAGCUAUGUUCAAAAUCACCA
>hsa-mir-4766 MI0017407
(SEQ ID NO: 2170)
CUGAAGCUCCUUCUGAAAGAGCAGUUGGUGUUUAUUUUUUACUAAAUAGCAAUUGCUCUUUUGGAAGGAACUUGAG
>hsa-mir-4767 MI0017408
(SEQ ID NO: 2171)
ACAUGGGCCCGCGGGCGCUCCUGGCCGCCGCCCGACUUCGGGGCCAGCCGGGGGCAGAGCGCGCGGGAGCCCGAGCGU
>hsa-mir-4768 MI0017409
(SEQ ID NO: 2172)
AAACUUUGAUUCUCUCUGGAUCCCAUGGAUAUGGGAACUGUGAUGUCCAGGAGAUCCAGAGAGAAUCAGAGUUU
>hsa-mir-4769 MI0017410
(SEQ ID NO: 2173)
GAGGAGAGGUGGGAUGGAGAGAAGGUAUGAGCUAAAAAUCCCCAAGCUCUGCCAUCCUCCCUCCCCUACUUCUCCCC
>hsa-mir-4770 MI0017411
(SEQ ID NO: 2174)
GAGUUAUGGGGUCAUCUAUCCUUCCCUUGGAAAAUGAUCUGAGAUGACACUGUAGCUC
>hsa-mir-4771-1 MI0017412
(SEQ ID NO: 2175)
GCUCUAGCCUAAUUUUAGAUCUGGUCUGCUUCAGUUUCACUCCAAGCAGACUUGACCUACAAUUAGCCUAGAGC
>hsa-mir-4771-2 MI0017413
(SEQ ID NO: 2176)
GCUCUAGCCUAAUUUUAGAUCUGGUCUGCUUCAGUUUCACUCCAAGCAGACUUGACCUACAAUUAGCCUAGAGC
>hsa-mir-4772 MI0017414
(SEQ ID NO: 2177)
GUGAUUGCCUCUGAUCAGGCAAAAUUGCAGACUGUCUUCCCAAAUAGCCUGCAACUUUGCCUGAUCAGAGGCAGUCAC
>hsa-mir-4773-1 MI0017415
(SEQ ID NO: 2178)
UGCUCCCCAGCCUUUCUAUGCUCCUGUUCUGCUUUAUUUCAUCAAAGCAGAACAGGAGCAUAGAAAGGCUGGGGAGCA
>hsa-mir-4773-2 MI0017416
(SEQ ID NO: 2179)
UGCUCCCCAGCCUUUCUAUGCUCCUGUUCUGCUUUGAUGAAAUAAAGCAGAACAGGAGCAUAGAAAGGCUGGGGAGCA
>hsa-mir-4774 MI0017417
(SEQ ID NO: 2180)
UAUAUUGUUGUCUGGUAUGUAGUAGGUAAUAACUGACAAACAGACAAUUGCCUAACAUGUGCCAGAAAACAACAUA
>hsa-mir-4775 MI0017418
(SEQ ID NO: 2181)
AUUAAGCUUUUAAUUUUUUGUUUCGGUCACUCUUGAUAGCAGACAUUGACUGAAACAAAAAAUUAAAAGCUUUAU
>hsa-mir-4776-1 MI0017419
(SEQ ID NO: 2182)
CUAUAUGCAGUGGACCAGGAUGGCAAGGGCUCUCCUGAAAGGACAGUAGAGCCCUUGCCAUCCUGGUCCACUGCAUA
UAG
>hsa-mir-4776-2 MI0017420
(SEQ ID NO: 2183)
CUAUAUGCAGUGGACCAGGAUGGCAAGGGCUCUACUGUCCUUUCAGGAGAGCCCUUGCCAUCCUGGUCCACUGCAUA
UAG
>hsa-mir-4777 MI0017421
(SEQ ID NO: 2184)
UAGAAUAUUUCGGCAUUCUAGAUGAGAGAUAUAUAUAUACCUCAUAUGUAUAUGGUAUACCUCAUCUAGAAUGCUGU
AAUAUUCUA
>hsa-mir-4778 MI0017422
(SEQ ID NO: 2185)
UCACAUGUCCAAUUCUGUAAAGGAAGAAGAGGUAAGAAGAAGUGAAGCCCUCUUCUUCCUUUGCAGAGUUGAAUAUG
UGG
>hsa-mir-4779 MI0017423
(SEQ ID NO: 2186)
UAAAUGUCUUACUGCUUUUACUGUUCCCUCCUAGAGUCCAUUCUUUACUCUAGGAGGGAAUAGUAAAAGCAGUAAGA
CAUUUA
>hsa-mir-4780 MI0017424
(SEQ ID NO: 2187)
GGCCAGUGCCAGGGGGUCAGGCUCAAGGACCAGCCCAAAGGCCAGGCCUGACCCUUGAGCCUGAUCCCUAGCACUGA
UCCC
>hsa-mir-4781 MI0017426
(SEQ ID NO: 2188)
AGGUGCACGCUCUAGCGGGGAUUCCAAUAUUGGGCCAAUUCCCCCAAUGUUGGAAUCCUCGCUAGAGCGUGCACUU
>hsa-mir-4782 MI0017427
(SEQ ID NO: 2189)
AUUGCCCAGUUCUGGAUAUGAAGACAAUCAAGAAAAGAUUUGGUGUUCUUGAUUGUCUUCAUAUCUAGAACUGGGCA
GU
>hsa-mir-4783 MI0017428
(SEQ ID NO: 2190)
GGGAAAGCGGAGGGCGCGCCCAGCUCCCGGGCUGAUUGCGCUAACAGUGGCCCCGGUGUUGGGGCGCGUCUGCCGCU
GCCCC
>hsa-mir-4784 MI0017429
(SEQ ID NO: 2191)
UGACUGGGCUGAGGAGAUGCUGGGACUGAGAGUGUCAUGGUGGAGCCUCCGUCCCUGCUCAUCCUCUCCGCAUGUUG
>hsa-mir-4785 MI0017430
(SEQ ID NO: 2192)
GUAGGUGGGGACGCGGCGGCGCUGCUCCUCCGCUGCCGCCGGGAGAGUCGGCGACGCCGCCAGCUCCGCGCGC
>hsa-mir-4786 MI0017433
(SEQ ID NO: 2193)
GGGCAUGGCCUGAGACCAGGACUGGAUGCACCACUCUCCCUGUGAUGAGGUGAAGCCAGCUCUGGUCUGGGCCAUUU
CAC
>hsa-mir-4787 MI0017434
(SEQ ID NO: 2194)
CGGUCCAGACGUGGCGGGGGUGGCGGCGGCAUCCCGGACGGCCUGUGAGGGAUGCGCCGCCCACUGCCCCGCGCCGC
CUGACCG
>hsa-mir-4788 MI0017435
(SEQ ID NO: 2195)
AAUGAAGGAUUACGGACCAGCUAAGGGAGGCAUUAGGAUCCUUAUUCUUGCCUCCCUUAGUUGGUCCCUAAUCCUUC
GUU
>hsa-mir-4789 MI0017436
(SEQ ID NO: 2196)
CAUGCUACGUAUGUAUACACCUGAUAUGUGUAUGUGUAAAUACAUAUCCACACACAUAGCAGGUGUAUAUAUAGGUA
GCCUG
>hsa-mir-4790 MI0017437
(SEQ ID NO: 2197)
CAAUGUGACAUCGCUUUACCAUUCAUGUUCACUGAAAGGUAGAUUUUAAAAACAUGAAUGGUAAAGCGAUGUCACAU
UG
>hsa-mir-4791 MI0017438
(SEQ ID NO: 2198)
UAAGAACUGGAUAUGAUGACUGAAAUAAGCUCCAUAUCAAUGAGAAUUUCAAUGGGAUUAUGUGCAGUCAAUGUCCA
GUAAUUA
>hsa-mir-4792 MI0017439
(SEQ ID NO: 2199)
GCAGCCCGGUGAGCGCUCGCUGGCCUGGCAGUGCGUCGGAAGAACAGGGCGGGUGGGGCCGCGCACAUCUCUGC
>hsa-mir-4793 MI0017440
(SEQ ID NO: 2200)
UUUCUCCUCGCUGCCCGCACAUCCUGCUCCACAGGGCAGAGGGAGGCCAAGAAGACCUCUGCACUGUGAGUUGGCUG
GCUGGAGGAA
>hsa-mir-4794 MI0017441
(SEQ ID NO: 2201)
UUUUAACAUCUGGCUAUCUCACGAGACUGUAUGUCCUAACAGUGCUUGUAGUCUCAUGAGAUAGCCAGAUGUUAAAA
>hsa-mir-4795 MI0017442
(SEQ ID NO: 2202)
UGAUAUGGAAGAAAUCCAGAAGUGGCUAAUAAUAUUGACACUAUAACAAUAAUGUCAAUAUUAUUAGCCACUUCUGG
AUUUAUGAAUCA
>hsa-mir-4796 MI0017443
(SEQ ID NO: 2203)
UAAAUUUGUGUCUAUACUCUGUCACUUUACUUUUGGCCUCAAGUCAUUGCAGUAAAGUGGCAGAGUAUAGACACAAA
UUUA
>hsa-mir-4797 MI0017444
(SEQ ID NO: 2204)
GACUCAGAAGACAGAGUGCCACUUACUGAAAGGUUUUUUCUCUCAGUAAGUGGCACUCUGUCUUCUGAGUU
>hsa-mir-4798 MI0017445
(SEQ ID NO: 2205)
AAGUACAACUUCGGUAUACUUUGUGAAUUGGCUUUUACAAAAGACCAACUCACGAAGUAUACCGAAGUCAUACUU
>hsa-mir-4799 MI0017446
(SEQ ID NO: 2206)
ACUGCUAAUAUCUAAAUGCAGCAUGCCAGUCCUGAGAUGCAGGGACUGGCAUGCUGCAUUUAUAUAUUAGCAGU
>hsa-mir-4800 MI0017448
(SEQ ID NO: 2207)
GGAGAAAGGAGUGGACCGAGGAAGGAAGGAAGGCAAGGCUGUCUGUCCAUCCGUCCGUCUGUCCACCUACCUGUCAG
UCC
>hsa-mir-4801 MI0017449
(SEQ ID NO: 2208)
UUGAGGCUUGGUUUUCUUAUGUGUAAAAUGUAAUAACAUUUCUUAUGUUUAAAACACUUUACACAAGAAAACCAAGG
CUCAA
>hsa-mir-4802 MI0017450
(SEQ ID NO: 2209)
CUGACUGGCUUGUAUGGAGGUUCUAGACCAUGUUAGUGUUCAAGUCUACAUGGAUGGAAACCUUCAAGCAGGCCAAG
CAG
>hsa-mir-4803 MI0017451
(SEQ ID NO: 2210)
AGUGGGAUUUAACAUAAUAGUGUGGAUUGAAUCACACACACAUUUCAACCCACACUAUGAUGUUAAAUCCCAUU
>hsa-mir-4804 MI0017452
(SEQ ID NO: 2211)
UCAGUGUAUUUGGACGGUAAGGUUAAGCAAGGUGCGUCGUAUCUUGCUUAACCUUGCCCUCGAAAUACACUGA
>hsa-mir-4999 MI0017865
(SEQ ID NO: 2212)
AUAGAAAAUAAAACACAUACUGCUGUAUUGUCAGGUAGUGAUAGGAUUUAUCACUACCUGACAAUACAGUAUGUGUU
UGUUUUAUAUAUUU
>hsa-mir-5000 MI0017866
(SEQ ID NO: 2213)
CUGAAGAGUAGAGUGUGUGGUCCCAGUUCAGAAGUGUUCCUGAGUAACUUGUGCUUAUAACUCAGGACACUUCUGAA
CUUGGACCAUACAGGUCUCCCUGCUU
>hsa-mir-5001 MI0017867
(SEQ ID NO: 2214)
AGCUCAGGGCGGCUGCGCAGAGGGCUGGACUCAGCGGCGGAGCUGGCUGCUGGCCUCAGUUCUGCCUCUGUCCAGGU
CCUUGUGACCCGCCCGCUCUCCU
>hsa-mir-5002 MI0017868
(SEQ ID NO: 2215)
UCUUCCUCUCUGUCCUCUGGAAUUUGGUUUCUGAGGCACUUAGUAGGUGAUAGCAUGACUGACUGCCUCACUGACCA
CUUCCAGAUGAGGGUUACUC
>hsa-mir-5003 MI0017869
(SEQ ID NO: 2216)
AUGAGUUUGCUUUGUGUCAUCCUCACAACAACCUUGCAGGGUAGAGAUGAUUUUUCCUACUUUUCUAGGUUGUUGGG
GGCUGGGGCAGGGGGAACAGAG
>hsa-mir-5004 MI0017870
(SEQ ID NO: 2217)
GGCACUUGCUUGGGGGUUAGUGAGGACAGGGCAAAUUCACGAGAUUGGGUUGUGCAGAGGCUGACACUUGGAUUUUC
CUGGGCCUCAGGACUUCCUUUCAGACAUGG
>hsa-mir-5006 MI0017873
(SEQ ID NO: 2218)
AACCAUUAGGGGGCUGUGGUUUGCCAGGGCAGGAGGUGGAAGGGAGCCCCAUUUACAGUGGUAACUUCCUUUCCCUU
UCCAUCCUGGCAGGCUUCAGAGAACUUUACCAG
>hsa-mir-5007 MI0017874
(SEQ ID NO: 2219)
GGUAAACCUUGGUGACUAAUUAGAGUCUGGCUGAUAUGGUUUGACACAGAGCUAAAUCAUAUGAACCAAACUCUAAU
UAGUCAAUAAUUUCUGUU
>hsa-mir-5008 MI0017876
(SEQ ID NO: 2220)
GGGCUGACCCCUAGGGUCAGGUGAGGCCCUUGGGGCACAGUGGUGCCAUCUCCCCUGUGCUCCCAGGGCCUCGCCUG
UCCCUUGAGGUCGGCCC
>hsa-mir-5009 MI0017877
(SEQ ID NO: 2221)
GACCAGAAGUGUUUUGGAUUUUGGACUUUUUCAGAUUUGGGGAUAUUUGCAUUAUACUUAUCCUAAAUCUGAAAGUC
CAAAACCUGAAAUGACCAAUAAG
>hsa-mir-5010 MI0017878
(SEQ ID NO: 2222)
GAUCCAGGGAACCCUAGAGCAGGGGGAUGGCAGAGCAAAAUUCAUGGCCUACAGCUGCCUCUUGCCAAACUGCACUG
GAUUUUGUGUCUCCCAUUCCCCAGAGCUGUCUGAGGUGCUUUG
>hsa-mir-5011 MI0017879
(SEQ ID NO: 2223)
AGAUGGUAUUGAGUGGAUGCUGUUAUAUAUACAGCCAUGCACUCUGUAGUUUGGGUACACAGUGCAUGGCUGUAUAU
AUAACACUAUCCAUUCAUCUUUCAGC
>hsa-mir-5047 MI0017932
(SEQ ID NO: 2224)
GAAGCGCUUGCCUAGACGAGACACAGUGCAUAAAAACAACUUUUGGGGGACAGGUAUGUUUUCUUGCAGCUGCGGUU
GUAAGGUCUUGGCAAGACAAGCA
>hsa-mir-5087 MI0017976
(SEQ ID NO: 2225)
AGCUUUCUACGGGUUUGUAGCUUUGCUGGCAUGUUAAGUGUUGUCCUACAGUCGCAAGCAUAAGAAAGAGAAAGUA
>hsa-mir-5088 MI0017977
(SEQ ID NO: 2226)
UCUCCAGGGUGGCCAGGCGGGGCCGGGCCUGAGGGAUGGAGGGGAGCCCAUCAGGGCUCAGGGAUUGGAUGGAGGUG
AUGGGGG
>hsa-mir-5089 MI0017978
(SEQ ID NO: 2227)
AAGGACUUCAGUGGGAUUUCUGAGUAGCAUCCUUGGAAUCUGCACUCAAGGGAUGCUACUCGGAAAUCCCACUGAAG
UCCUUUU
>hsa-mir-5090 MI0017979
(SEQ ID NO: 2228)
UCUGAGGUACCCGGGGCAGAUUGGUGUAGGGUGCAAAGCCUGCCCGCCCCCUAAGCCUUCUGCCCCCAACUCCAGCC
UGUCAGGA
>hsa-mir-5091 MI0017980
(SEQ ID NO: 2229)
GACUGUGGCGACGGAGACGACAAGACUGUGCUGGUCGCGGGUUGUGGGGUUUAGGUCACCGGCAGGGGUCUGGAGUC
CCUGGAGGUUAGGGCU
>hsa-mir-5092 MI0017981
(SEQ ID NO: 2230)
AUCCCAGAUCAGAUGCCAAAGCCAGUGGGGACUGGACAACAUGAUGAGCCCAAACCAAUCCACGCUGAGCUUGGCAU
CUGAUUUGGGA
>hsa-mir-5093 MI0017982
(SEQ ID NO: 2231)
CCCGCCAGGUCCACAUGCCAGAGUGUCAACGUGACCCAGCCAGCCUCCUUCCUGAGCUAGGAGGAUUAGGAAAUGAG
GCUGGCUAGGAGCACAGCCAGGG
>hsa-mir-5094 MI0017983
(SEQ ID NO: 2232)
AAAAGAAAAAAAUCAGUGAAUGCCUUGAACCUAACACACUGCCUUUUAUGUGGUAGGUACAGUGGGCUCACUGAAAC
AUUCAACU
>hsa-mir-5095 MI0018001
(SEQ ID NO: 2233)
CUGGGAUUACAGGCGUGAACCACCGCGCCCGGCCUAACUUUUAAGAAACGUCGGCCCGGGAGCGGUGGCUCACGCCU
GUAAUCCCAGC
>hsa-mir-5096 MI0018004
(SEQ ID NO: 2234)
AGUAGAGGUGGGGUUUCACCAUGUUGGUCAGGCUGGUCUCAAACUCCUGACCUCAGGUGAUCCAUCCACC
>hsa-mir-5100 MI0019116
(SEQ ID NO: 2235)
CCAUGAGGAGCUGGCAGUGGGAUGGCCUGGGGGUAGGAGCGUGGCUUCUGGAGCUAGACCACAUGGGUUCAGAUCCC
AGCGGUGCCUCUAACUGGCCACAGGACCUUGGGCAGUCAGCU
>hsa-mir-5186 MI0018165
(SEQ ID NO: 2236)
UCAGCCAGCUUAUGACUUGACCCUCUCACCUGAUUUCUACCAACCUUUCCUCAGCUGAUUUCUUUCUGGGGAGAGAU
UGGUAGAAAUCAGGUGAGAGGGUCAUGCCAUAAGCUGGCUAAC
>hsa-mir-5187 MI0018166
(SEQ ID NO: 2237)
GACUAAGGGUGGGAUGAGGGAUUGAAGUGGAGCAGGAAUGCGCUUUUCUCCACUGAAUCCUCUUUUCCUCAGGUGG
>hsa-mir-5188 MI0018167
(SEQ ID NO: 2238)
GGGAGGCAUGGAAAUUUCUCUGGUUUCAAUGGGUACGAUUAUUGUAAGCAGGAUCCAUUCAAUAAUCGGACCCAUUU
AAACCGGAGAUUUUAAAAGACAGGAAUAGAAUCCCA
>hsa-mir-5189 MI0018168
(SEQ ID NO: 2239)
GGCCCGCCUUUUAGGGGCCUCGCUGUCUGGGCACAGGCGGAUGGACAGGCUGGCCUCUGGAUGACCUGCCAACCGUC
AGAGCCCAGACCCACGUGGCCUCAGUUGGGGACCAGG
>hsa-mir-5190 MI0018169
(SEQ ID NO: 2240)
GGUCAUACCCUGGCUCCAGCCCUGUCACAUGGUUAAUGUUCCACAGCCAGUGACUGAGCUGGAGCCAGGGCCACUGC
CCC
>hsa-mir-5191 MI0018170
(SEQ ID NO: 2241)
AGUUGGCCAGGACCCCAAGCCCCCAGCACUUCAUUCUUGCUGUCCUCUCCUGGUCUGGGAGGAUAGAAGAGAGGAUA
GGAAGAAUGAAGUGCUGGGCGCUUAGGGGGAUCCUGGCCAACU
>hsa-mir-5192 MI0018171
(SEQ ID NO: 2242)
UUAGUUCCAGCCUCCUGGCUCACCUGGAACCAUUUCUCCUGGGAAGCAUGGUAGCCAGGAGAGUGGAUUCCAGGUGG
UGAGGGCUUGGUACU
>hsa-mir-5193 MI0018172
(SEQ ID NO: 2243)
CCUAGGAAAGGCUGCUGGUAACUGGGAUGGGGGUUGGGGGGAGGUAAGAAGUCUCUGACUCCUCCUCUACCUCAUCC
CAGUUCCAUCACCUGAAGUGGACCUCUUGGGA
>hsa-mir-5194 MI0018173
(SEQ ID NO: 2244)
AUUUCUUUGGGUUAACUUAAACUCAGCCCUUCUAGGCCCAUUCUUUUCACUCAGGAAUUGGAUAAGCUUUUCUGAGG
GGUUUGGAAUGGGAUGGCAGGGAGAGUCACCAGACACCAUGAA
>hsa-mir-5195 MI0018174
(SEQ ID NO: 2245)
GAGCAAAAACCAGAGAACAACAUGGGAGCGUUCCUAACCCCUAAGGCAACUGGAUGGGAGACCUGACCCAUCCAGUU
CUCUGAGGGGGCUCUUGUGUGUUCUACAAGGUUGUUCA
>hsa-mir-5196 MI0018175
(SEQ ID NO: 2246)
UCUGAGGAGACCUGGGCUGUCAGAGGCCAGGGAAGGGGACGAGGGUUGGGGAACAGGUGGUUAGCACUUCAUCCUCG
UCUCCCUCCCAGGUUAGAAGGGCCCCCCUCUCUGAAGG
>hsa-mir-5197 MI0018176
(SEQ ID NO: 2247)
UAUGGGAUUCCACAGACAAUGAGUAUCAAUGGCACAAACUCAUUCUUGAAUUUUUGCCAGUUCAAGAAGAGACUGAG
UCAUCGAAUGCUCUAAAUGUCACUUCACCUCAUGU
>hsa-mir-5571 MI0019115
(SEQ ID NO: 2248)
AUCUGACACAAAAUGUGAACCAAGCAAUUCUCAAAGGAGCCUCCCAGGAAAUUCACUUUAGGAAGUCCUAGGAGGCU
CCUCUGAGAGUUGCUAAAACAAAACAUUGAGAGUCC
>hsa-mir-5572 MI0019117
(SEQ ID NO: 2249)
AGCCAGACAAGAGGGUCAUGGGGAGUCACUGUCAACCCAGAGCAGGCACUGCCCCUGCGACCAGCCUGGGGCAUCGG
UUGGGGUGCAGGGGUCUGCUGGUGAUGCUUUCCAUCUCUUUGCUUUGUCCUGAUUGUAGC
>hsa-mir-5579 MI0019133
(SEQ ID NO: 2250)
UAUGGUACUCCUUAAGCUAACAGGCCCCUGUCACCAUUAGCUUAAGGAGUACCAGAUC
>hsa-mir-5580 MI0019135
(SEQ ID NO: 2251)
UGCUGGCUCAUUUCAUAUGUGUGCUGAGAAAAUUCACACAUAUGAAGUGAGCCAGCAC
>hsa-mir-5581 MI0019136
(SEQ ID NO: 2252)
AGCCUUCCAGGAGAAAUGGAGACCCUAUACAUACCUGUUUCCAUGCCUCCUAGAAGUUCC
>hsa-mir-5582 MI0019138
(SEQ ID NO: 2253)
UAGGCACACUUAAAGUUAUAGCUACAUCAGUUAUAACUAUAUCAGUUAAAACUUUAAGUGUGCCUAGG
>hsa-mir-5583-1 MI0019139
(SEQ ID NO: 2254)
AAACUAAUAUACCCAUAUUCUGGCUAGGUGAUCAUCAGAAUAUGGGUAUAUUAGUUUGG
>hsa-mir-5583-2 MI0019140
(SEQ ID NO: 2255)
AAACUAAUAUACCCAUAUUCUGAUGAUCACCUAGCCAGAAUAUGGGUAUAUUAGUUUGG
>hsa-mir-5584 MI0019141
(SEQ ID NO: 2256)
CAGGGAAAUGGGAAGAACUAGAUUUGAAUCCAGACCUUUAGUUCUUCCCUUUGCCCAAUU
>hsa-mir-5585 MI0019142
(SEQ ID NO: 2257)
UGAAGUACCAGCUACUCGAGAGGUCAGAGGAUUGCUCCUGAAUAGCUGGGACUACAGGU
>hsa-mir-5586 MI0019143
(SEQ ID NO: 2258)
UAUCCAGCUUGUUACUAUAUGCUUUUUAAAUGGGGCACAGAGUGACAAGCUGGUUAAAG
>hsa-mir-5587 MI0019144
(SEQ ID NO: 2259)
AUGGUCACCUCCGGGACUCAGCCCUGUGCUGAGCCCCGGGCAGUGUGAUCAUC
>hsa-mir-5588 MI0019147
(SEQ ID NO: 2260)
ACUGGCAUUAGUGGGACUUUUUUUUUUUUUUUUUUUAAUGUUAAAAGUCCCACUAAUGCCAGC
>hsa-mir-5589 MI0019148
(SEQ ID NO: 2261)
GGCUGGGUGCUCUUGUGCAGUGAGCAACCUACACAACUGCACAUGGCAACCUAGCUCCCA
>hsa-mir-5590 MI0019150
(SEQ ID NO: 2262)
UUGCCAUACAUAGACUUUAUUGUGUUGAUCAACAAUAAAGUUCAUGUAUGGCAA
>hsa-mir-5591 MI0019151
(SEQ ID NO: 2263)
UGGGAGCUAAGCUAUGGGUAUACUGAGCUUAUGUAUGCAUCUGCAUACCCAUAGCUUAGCUCCCA
>hsa-mir-5680 MI0019280
(SEQ ID NO: 2264)
GCAUUGGGUUAGCAGGUUAGCCCAGCAUUUCCCUUCCUGGACACACAGGAGGAGAAAUGCUGGACUAAUCUGCUAAU
CCAAUGC
>hsa-mir-5681a MI0019281
(SEQ ID NO: 2265)
AGUUUUUGAAGAGUAUUGCCACCCUUUCUAGUCCCUAUUAGACUAGAAAGGGUGGCAAUACCUCUUCCAAAAACU
>hsa-mir-5681b MI0019293
(SEQ ID NO: 2266)
GAAGAGGUAUUGCCACCCUUUCUAGUCUAAUAGGGACUAGAAAGGGUGGCAAUACUCUUC
>hsa-mir-5682 MI0019282
(SEQ ID NO: 2267)
GGCCCAUGGGUCUUAUCCUGCAAGGUGCUGCAGAGACGAGGCCUGUAGCACCUUGCAGGAUAAGGUCUACUGGGCC
>hsa-mir-5683 MI0019284
(SEQ ID NO: 2268)
GGAGCUUGUUACAGAUGCAGAUUCUCUGACUUCUUACUGCACCAGUGAAGUCAGGAUCUGCAUUUGAAUAAGACCC
>hsa-mir-5684 MI0019285
(SEQ ID NO: 2269)
GCUGAACUCUAGCCUGAGCAACAGAGUGAGAUGGUCUUGUUUUGUUGCCCAGGCUGGAGUCCAGU
>hsa-mir-5685 MI0019287
(SEQ ID NO: 2270)
CUCUACAUCACAGCCCAGCAGUUAUCACGGGCCCCUCCCCUCAAUGGGCCCGUGAUAACUGCAGGGCUGUGAUGUAG
AG
>hsa-mir-5686 MI0019290
(SEQ ID NO: 2271)
UAUCGUAUCGUAUCGUAUCGUAUUGUAUUGUACUGUAUUGUAUUGUACUGUAUUGUAUCGUAUCGUAUCGUAUCGUA
UCGUA
>hsa-mir-5687 MI0019291
(SEQ ID NO: 2272)
CCUCACUUAUCUGACUCUGAAAUCUUCUAAAUGGUACCCACUUUAUUUAGAACGUUUUAGGGUCAAAUAAGUACAGG
>hsa-mir-5688 MI0019292
(SEQ ID NO: 2273)
GAAACACUUUGCCUUUUUACAGGAGUUUAUUAUGUUUUGGACAUAGAAACAUAACAAACACCUGUAAAACAGCAAAG
UGUUUC
>hsa-mir-5689 MI0019294
(SEQ ID NO: 2274)
AGCGUGGUAGCAUACACCUGUAGUCCUAGAUACUCAGGAGGGUGAGUAUCUAGGACUACAGGUGUGUGCUACCACGCU
>hsa-mir-5690 MI0019295
(SEQ ID NO: 2275)
CUUUUAAUUUCAGCUACUACCUCUAUUAGGAUUUGGGAGUUAUACUAAUAGAGGUAAUAGUUGAAAUUAAGAG
>hsa-mir-5691 MI0019296
(SEQ ID NO: 2276)
GGACAAGCUUGCUCUGAGCUCCGAGAAAGCUGACAGACAGCUGCUUGGUGUUCAGAGCUUGUCUGUCC
>hsa-mir-5692a-1 MI0019297
(SEQ ID NO: 2277)
GACAGUACAAAUAAUACCACAGUGGGUGUACCUCAUGUGUGUACACCCUGUGAUAUUAUUUGUAAUAUC
>hsa-mir-5692a-2 MI0019298
(SEQ ID NO: 2278)
UACAAAUAAUACCACAGUGGGUGUACCUCAUGUGUGUACACCCUGUGAUAUUAUUUGUA
>hsa-mir-5692b MI0019311
(SEQ ID NO: 2279)
GAUAUUAUGAAUAAUAUCACAGUAGGUGUUCACACAUAAUGUGUACACCAUGUGUGUACACCCAUGUGAUAUUUGAA
GUAGUAUGUC
>hsa-mir-5692c-1 MI0019288
(SEQ ID NO: 2280)
UAUAACAUUGUAUAUACCCACUGUGAUAUUAAGAGUAAUAGCUCUCUAGGUUAUUAUGAAUAAUAUCACAGUAGGUG
UACACAAUGUUGUA
>hsa-mir-5692c-2 MI0019289
(SEQ ID NO: 2281)
UGUGUACACCAACUGUGAUAUUAGGAGUCCUAUUUAUUUUUAGGAUAUUAGGAAUAAUAUCACAGUAGGUGUACACA
>hsa-mir-5693 MI0019300
(SEQ ID NO: 2282)
CUGGGAAGUUAGUUCAUUUCAGUCUGUGCUGUGAGCUAGCCAGCAGUGGCUCUGAAAUGAACUCAAACUCUAG
>hsa-mir-5694 MI0019301
(SEQ ID NO: 2283)
GCCAACUGCAGAUCAUGGGACUGUCUCAGCCCCAUAUGUAUCUGAAGGCUGAGAAGUCCCAUGAUCCGCACUUGGC
>hsa-mir-5695 MI0019302
(SEQ ID NO: 2284)
CAAGGCCUAUCUAUCUAGAUUCUUCUUGGCCUCUCUGAGCAUGCAUUCCUGAGACUCCAAGAAGAAUCUAGACAGAU
AGGCCUUG
>hsa-mir-5696 MI0019303
(SEQ ID NO: 2285)
GUGCUCAUUUAAGUAGUCUGAUGCCUACUACUGAUGACAUACAAUGUAAGUGCUCAUUUAGGCGUCAGACUACCUAA
AUGAGCAC
>hsa-mir-5697 MI0019304
(SEQ ID NO: 2286)
AGCAUAUUCUCAAGUAGUUUCAUGAUAAAGGGUGUAUGAGAGAUCAACCCUUUAUCAUGAAACGCUUGAGGAUACGCU
>hsa-mir-5698 MI0019305
(SEQ ID NO: 2287)
CUGUGCACCUGGGGGAGUGCAGUGAUUGUGGAAUGCAAAGUCCCACAAUCACUGUACUCCCCAGGUGCACAG
>hsa-mir-5699 MI0019306
(SEQ ID NO: 2288)
CUGUACCCCUGCCCCAACAAGGAAGGACAAGAGGUGUGAGCCACACACACGCCUGGCCUCCUGUCUUUCCUUGUUGG
AGCAGGGAUGUAG
>hsa-mir-5700 MI0019307
(SEQ ID NO: 2289)
UUAAUUAAUGCAUUAAAUUAUUGAAGGCCCUUGGGCACCCCAGGCCUUCAAUAAUUUAAUGCAUUUAUUGA
>hsa-mir-5701-1 MI0019308
(SEQ ID NO: 2290)
GAUUGGACUUUAUUGUCACGUUCUGAUUGGUUAGCCUAAGACUUGUUCUGAUCCAAUCAGAACAUGAAAAUAACGUC
CAAUC
>hsa-mir-5701-2 MI0019593
(SEQ ID NO: 2291)
GAUUGGACUUUAUUGUCACGUUCUGAUUGGUUAGCCUAAGACUUGUUCUGAUCCAAUCAGAACAUGAAAAUAACGUC
CAAUC
>hsa-mir-5702 MI0019309
(SEQ ID NO: 2292)
GCCUCAACUCCUGGGAUAUGUUGCUGAUCCAACCUGAAAUCCUUCUGUAGGUUGAGUCAGCAACAUAUCCCAUGACU
UUUGGGU
>hsa-mir-5703 MI0019310
(SEQ ID NO: 2293)
UUGCCGUCCCCUUCCUCGUCUUUUCCCCUCAGGAGAAGUCGGGAAGGUGGCGGCGG
>hsa-mir-5704 MI0019312
(SEQ ID NO: 2294)
UGAUCUUGUUUAGGCCAUCAUCCCAUUAUGCUAAGUCCAUGGGCAAACAUAACAGGAUGAUGGCCUAAACAAGACCA
>hsa-mir-5705 MI0019313
(SEQ ID NO: 2295)
UCCCCAUUUACACAGGCCAUGAGCCCCGAAACACCCAUCCCAGGAUUGCUGAUGGGUGUUUCGGGGCUCAUGGCCUG
UGUAAAUGGGGA
>hsa-mir-5706 MI0019314
(SEQ ID NO: 2296)
AGCUAGGUCUUCUGGAUAACAUGCUGAAGCUUCUACGUCAUUCAGCACUUGCUUCAGCAUGUUUUCCAGAGGAUCUA
GCU
>hsa-mir-5707 MI0019315
(SEQ ID NO: 2297)
UGUAAGAACACGUUUGAAUGCUGUACAAGGCACAUAUGUGAACAUUGUACCACAUGUACAGCUUUCAAACAUGCUCU
UAUA
>hsa-mir-5708 MI0019316
(SEQ ID NO: 2298)
AUUACAGACAUGAGCGACUGUGCCUGACCAAAAGUCAACAUUAAACAACAAAUCUUGGCCAGGCACAGUGGCUCAUG
CCUGUAAU

1. A method for making a chirally controlled oligonucleotide comprising steps of:
(1) coupling;
(2) capping;
(3) modifying;
(4) deblocking; and
(5) repeating steps (1)-(4) until a desired length is achieved;
wherein a coupling step comprises reacting a phosphoramidite with an oligonucleotide comprising an internucleotidic linkage having the structure of formula I-c: [chemical structure]
wherein:
P* is an asymmetric phosphorus atom and is either Rp or Sp;
L is a covalent bond or an optionally substituted, linear or branched C₁-C₅₀ alkylene, wherein one or more methylene units of L are optionally and independently replaced by an optionally substituted C₁-C₆ alkylene, C₁-C₆ alkenylene, —C≡C—, —C(R′)₂—, —Cy-, —O—, —S—, —S—S—, —N(R′)—, —C(O)—, —C(S)—, —C(NR′)—, —C(O)N(R′)—, —N(R′)C(O)N(R′)—, —N(R′)C(O)—, —N(R′)C(O)O—, —OC(O)N(R′)—, —S(O)—, —S(O)₂—, —S(O)₂N(R′)—, —N(R′)S(O)₂—, —SC(O)—, —C(O)S—, —OC(O)—, or —C(O)O—;
R¹ is halogen, R, or an optionally substituted C₁-C₁₀ aliphatic wherein one or more methylene units are optionally and independently replaced by an optionally substituted C₁-C₆ alkylene, C₁-C₆ alkenylene, —C≡C—, —C(R′)₂—, —Cy-, —O—, —S—, —S—S—, —N(R′)—, —C(O)—, —C(S)—, —C(NR′)—, —C(O)N(R′)—, —N(R′)C(O)N(R′)—, —N(R′)C(O)—, —N(R′)C(O)O—, —OC(O)N(R′)—, —S(O)—, —S(O)₂—, —S(O)₂N(R′)—, —N(R′)S(O)₂—, —SC(O)—, —C(O)S—, —OC(O)—, or —C(O)O—;
each R′ is independently —R, —C(O)R, —CO₂R, or —SO₂R, or
two R′ on the same nitrogen are taken together with their intervening atoms to form an optionally substituted heterocyclic or heteroaryl ring, or
two R′ on the same carbon are taken together with their intervening atoms to form an optionally substituted aryl, carbocyclic, heterocyclic, or heteroaryl ring;
-Cy- is an optionally substituted bivalent ring selected from phenylene, carbocyclylene, arylene, heteroarylene, or heterocyclylene;
each R is independently hydrogen, or an optionally substituted group selected from C₁-C₆ aliphatic, phenyl, carbocyclyl, aryl, heteroaryl, and heterocyclyl;
each [chemical structure]
independently represents a connection to a nucleoside; and
R′ is not —H when L is a covalent bond.

2. The method of claim 1, wherein the phosphoramidite is stereochemically pure.

3. The method of claim 1, wherein the phosphoramidite is [chemical structure]
wherein B^{PRO} is a protected nucleobase.

4. The method of claim 1, wherein the phosphoramidite is selected from:

[chemical structure]

[chemical structure]

[chemical structure]

[chemical structure]

[chemical structure]

[chemical structure]

[chemical structure]

[chemical structure]

[chemical structure]

[chemical structure]

[chemical structure]

[chemical structure]

[chemical structure]

[chemical structure]

[chemical structure]

[chemical structure]

[chemical structure]

[chemical structure]

5. The method of claim 1, wherein the phosphoramidite is of the structure [chemical structure]
or a salt thereof, wherein B^{PRO} is a protected nucleobase.

6. The method of claim 3, wherein the step of capping comprises capping of the amino group in the chiral auxiliary and capping of unreacted 5′-OH.

7. The method of claim 4, wherein the step of capping comprises capping of the amino group in the chiral auxiliary and capping of unreacted 5′-OH.

8. The method of claim 1, wherein the step of deblocking comprises use of acid.

9. The method of claim 1, wherein the internucleotidic linkage has the structure of

[chemical structure]

10. The method of claim 1, wherein the chirally controlled oligonucleotide is at least 10 nucleotide units in length.

11. The method of claim 2, wherein the phosphoramidite is [chemical structure]
wherein B^{PRO} is a protected nucleobase.

12. The method of claim 2, wherein the phosphoramidite is selected from:

[chemical structure]

[chemical structure]

[chemical structure]

[chemical structure]

[chemical structure]

[chemical structure]

[chemical structure]

[chemical structure]

[chemical structure]

[chemical structure]

[chemical structure]

[chemical structure]

[chemical structure]

[chemical structure]

[chemical structure]

[chemical structure]

[chemical structure]

[chemical structure]

13. The method of claim 11, wherein the step of capping comprises capping of the amino group in the chiral auxiliary and capping of unreacted 5′-OH.

14. The method of claim 12, wherein the step of capping comprises capping of the amino group in the chiral auxiliary and capping of unreacted 5′-OH.

15. The method of claim 2, wherein the step of deblocking comprises use of acid.

16. The method of claim 2, wherein the internucleotidic linkage has the structure of

[chemical structure]

17. The method of claim 2, wherein the chirally controlled oligonucleotide is at least 10 nucleotide units in length.

18. The method of claim 11, wherein the chirally controlled oligonucleotide is at least 10 nucleotide units in length.

19. The method of claim 12, wherein the chirally controlled oligonucleotide is at least 10 nucleotide units in length.

20. An oligonucleotide having the structure of: [chemical structure]
wherein:
W² is —NG⁵-, —O—, or —S—;
------ is [chemical structure]
U₁ and U₃ are carbon atoms which are bonded to U₂ if present, or to each other if r is 0, via a single, double or triple bond;
U₂ is —C—, —CG⁸-, —CG⁸G⁸-, —NG⁸-, —N—, —O—, or —S—, and r is an integer of 0 to 5 and no more than two heteroatoms are adjacent;
G¹, G², G³, G⁴, G⁵ and G⁸ are each independently hydrogen, or an optionally substituted group selected from alkyl, aralkyl, cycloalkyl, cycloalkylalkyl, heterocyclyl, heteroaryl, or aryl; or two of G¹, G², G³, G⁴, and G⁵ are G⁶ which are taken together to form an optionally substituted saturated, partially unsaturated or unsaturated carbocyclic or heteroatom-containing ring of up to about 20 ring atoms which is monocyclic or polycyclic, fused or unfused, and no more than four of G¹, G², G³, G⁴, and G⁵ are G⁶; and
the oligonucleotide comprises an internucleotidic linkage having the structure of formula I-c: [chemical structure]
wherein:
P* is an asymmetric phosphorus atom and is either Rp or Sp;
L is a covalent bond or an optionally substituted, linear or branched C₁-C₅₀ alkylene, wherein one or more methylene units of L are optionally and independently replaced by an optionally substituted C₁-C₆ alkylene, C₁-C₆ alkenylene, —C≡C—, —C(R′)₂—, —Cy-, —O—, —S—, —S—S—, —N(R′)—, —C(O)—, —C(S)—, —C(NR′)—, —C(O)N(R′)—, —N(R′)C(O)N(R′)—, —N(R′)C(O)—, —N(R′)C(O)O—, —OC(O)N(R′)—, —S(O)—, —S(O)₂—, —S(O)₂N(R′)—, —N(R′)S(O)₂—, —SC(O)—, —C(O)S—, —OC(O)—, or —C(O)O—;
R¹ is halogen, R, or an optionally substituted C₁-C₁₀ aliphatic wherein one or more methylene units are optionally and independently replaced by an optionally substituted C₁-C₆ alkylene, C₁-C₆ alkenylene, —C≡C—, —C(R′)₂—, —Cy-, —O—, —S—, —S—S—, —N(R′)—, —C(O)—, —C(S)—, —C(NR′)—, —C(O)N(R′)—, —N(R′)C(O)N(R′)—, —N(R′)C(O)—, —N(R′)C(O)O—, —OC(O)N(R′)—, —S(O)—, —S(O)₂—, —S(O)₂N(R′)—, —N(R′)S(O)₂—, —SC(O)—, —C(O)S—, —OC(O)—, or —C(O)O—;
each R′ is independently —R, —C(O)R, —CO₂R, or —SO₂R, or
two R′ on the same nitrogen are taken together with their intervening atoms to form an optionally substituted heterocyclic or heteroaryl ring, or
two R′ on the same carbon are taken together with their intervening atoms to form an optionally substituted aryl, carbocyclic, heterocyclic, or heteroaryl ring;
-Cy- is an optionally substituted bivalent ring selected from phenylene, carbocyclylene, arylene, heteroarylene, or heterocyclylene;
each R is independently hydrogen, or an optionally substituted group selected from C₁-C₆ aliphatic, phenyl, carbocyclyl, aryl, heteroaryl, and heterocyclyl;
each [chemical structure]
independently represents a connection to a nucleoside; and
R¹ is not —H when L is a covalent bond.

The application's sequence listing, which the Patent Office published only in electronic form, follows.

SEQUENCE LISTING (2308 sequences)

SEQ ID NO: 1 - DNA, 15 bp, synthetic construct
  misc_feature 1..15: note = Description of Artificial Sequence: Synthetic oligonucleotide
  source 1..15: mol_type = other DNA
gctagacgttagcgt

SEQ ID NO: 2 - DNA, 15 bp, synthetic construct
  misc_feature 1..15: note = Description of Artificial Sequence: Synthetic oligonucleotide
  source 1..15: mol_type = other DNA
gctagatgttagcgt

SEQ ID NO: 3 - DNA, 15 bp, synthetic construct
  misc_feature 1..15: note = Description of Artificial Sequence: Synthetic oligonucleotide
  source 1..15: mol_type = other DNA
gctagacgttagcgt

SEQ ID NO: 4 - DNA, 15 bp, synthetic construct
  misc_feature 1..15: note = Description of Artificial Sequence: Synthetic oligonucleotide
  source 1..15: mol_type = other DNA
gctagacgttagcgt

SEQ ID NO: 5 - DNA, 15 bp, synthetic construct
  misc_feature 1..15: note = Description of Artificial Sequence: Synthetic oligonucleotide
  source 1..15: mol_type = other DNA
gcatgacgttgagct

SEQ ID NO: 6 - DNA, 20 bp, synthetic construct
  misc_feature 1..20: note = Description of Artificial Sequence: Synthetic oligonucleotide
  source 1..20: mol_type = other DNA
atggaaggtccagcgttctc

SEQ ID NO: 7 - DNA, 20 bp, synthetic construct
  misc_feature 1..20: note = Description of Artificial Sequence: Synthetic oligonucleotide
  source 1..20: mol_type = other DNA
atcgactctcgagcgttctc

SEQ ID NO: 8 - DNA, 20 bp, synthetic construct
  misc_feature 1..20: note = Description of Artificial Sequence: Synthetic oligonucleotide
  source 1..20: mol_type = other DNA
atcgactctcgagcgttctc

SEQ ID NO: 9 - DNA, 20 bp, synthetic construct
  misc_feature 1..20: note = Description of Artificial Sequence: Synthetic oligonucleotide
  source 1..20: mol_type = other DNA
atcgactctcgagcgttctc

SEQ ID NO: 10 - DNA, 20 bp, synthetic construct
  misc_feature 1..20: note = Description of Artificial Sequence: Synthetic oligonucleotide
  source 1..20: mol_type = other DNA
atcgactctcgagcgttctc

SEQ ID NO: 11 - DNA, 20 bp, synthetic construct
  misc_feature 1..20: note = Description of Artificial Sequence: Synthetic oligonucleotide
  source 1..20: mol_type = other DNA
atcgactctcgaacgttctc

SEQ ID NO: 12 - DNA, 20 bp, synthetic construct
  misc_feature 1..20: note = Description of Artificial Sequence: Synthetic oligonucleotide
  source 1..20: mol_type = other DNA
gagaacgctggaccttccat

SEQ ID NO: 13 - DNA, 20 bp, synthetic construct
  misc_feature 1..20: note = Description of Artificial Sequence: Synthetic oligonucleotide
  source 1..20: mol_type = other DNA
gagaacgctcgaccttccat

SEQ ID NO: 14 - DNA, 20 bp, synthetic construct
  misc_feature 1..20: note = Description of Artificial Sequence: Synthetic oligonucleotide
  source 1..20: mol_type = other DNA
gagaacgctcgaccttcgat

SEQ ID NO: 15 - DNA, 20 bp, synthetic construct
  misc_feature 1..20: note = Description of Artificial Sequence: Synthetic oligonucleotide
  source 1..20: mol_type = other DNA
gagcaagctggaccttccat

SEQ ID NO: 16 - DNA, 20 bp, synthetic construct
  misc_feature 1..20: note = Description of Artificial Sequence: Synthetic oligonucleotide
  source 1..20: mol_type = other DNA
gagcacgctggaccttccat

SEQ ID NO: 17 - DNA, 20 bp, synthetic construct
  misc_feature 1..20: note = Description of Artificial Sequence: Synthetic oligonucleotide
  source 1..20: mol_type = other DNA
gagaacgctggaccttccat

SEQ ID NO: 18 - DNA, 20 bp, synthetic construct
  misc_feature 1..20: note = Description of Artificial Sequence: Synthetic oligonucleotide
  source 1..20: mol_type = other DNA
gagaacgatggaccttccat

SEQ ID NO: 19 - DNA, 20 bp, synthetic construct
  misc_feature 1..20: note = Description of Artificial Sequence: Synthetic oligonucleotide
  source 1..20: mol_type = other DNA
gagaacgctccagcactgat

SEQ ID NO: 20 - DNA, 19 bp, synthetic construct
  misc_feature 1..19: note = Description of Artificial Sequence: Synthetic oligonucleotide
  source 1..19: mol_type = other DNA
ccatgtcggtcctgatgct

SEQ ID NO: 21 - DNA, 20 bp, synthetic construct
  misc_feature 1..20: note = Description of Artificial Sequence: Synthetic oligonucleotide
  source 1..20: mol_type = other DNA
tccatgctggtcctgatgct

SEQ ID NO: 22 - DNA, 20 bp, synthetic construct
  misc_feature 1..20: note = Description of Artificial Sequence: Synthetic oligonucleotide
  source 1..20: mol_type = other DNA
tccatgtcggtcctgatgct

SEQ ID NO: 23 - DNA, 20 bp, synthetic construct
  misc_feature 1..20: note = Description of Artificial Sequence: Synthetic oligonucleotide
  source 1..20: mol_type = other DNA
tccatgtcggtcctgatgct

SEQ ID NO: 24 - DNA, 20 bp, synthetic construct
  misc_feature 1..20: note = Description of Artificial Sequence: Synthetic oligonucleotide
  source 1..20: mol_type = other DNA
tccatgacgttcctgatgct

SEQ ID NO: 25 - DNA, 20 bp, synthetic construct
  misc_feature 1..20: note = Description of Artificial Sequence: Synthetic oligonucleotide
  source 1..20: mol_type = other DNA
tccatgtcggtcctgacgca

SEQ ID NO: 26-34 - skipped (9 entries)

SEQ ID NO: 35 - DNA, 20 bp, synthetic construct
  misc_feature 1..20: note = Description of Artificial Sequence: Synthetic oligonucleotide
  source 1..20: mol_type = other DNA
atggactctccagcgttctc

SEQ ID NO: 36 - DNA, 20 bp, synthetic construct
  misc_feature 1..20: note = Description of Artificial Sequence: Synthetic oligonucleotide
  source 1..20: mol_type = other DNA
ataggaggtccaacgttctc

SEQ ID NO: 37 - DNA, 20 bp, synthetic construct
  misc_feature 1..20: note = Description of Artificial Sequence: Synthetic oligonucleotide
  source 1..20: mol_type = other DNA
atcgactctcgagcgttctc

SEQ ID NO: 38 - DNA, 20 bp, synthetic construct
  misc_feature 1..20: note = Description of Artificial Sequence: Synthetic oligonucleotide
  source 1..20: mol_type = other DNA
atggaggctccatcgttctc

SEQ ID NO: 39 - DNA, 21 bp, synthetic construct
  misc_feature 1..21: note = Description of Artificial Sequence: Synthetic oligonucleotide
  source 1..21: mol_type = other DNA
atcggactctcgagcgttctc

SEQ ID NO: 40 - DNA, 20 bp, synthetic construct
  misc_feature 1..20: note = Description of Artificial Sequence: Synthetic oligonucleotide
  source 1..20: mol_type = other DNA
atcgactctcgagcgttctc

SEQ ID NO: 41 - DNA, 15 bp, synthetic construct
  misc_feature 1..15: note = Description of Artificial Sequence: Synthetic oligonucleotide
  source 1..15: mol_type = other DNA
gcatgacgttgagct

SEQ ID NO: 42 - DNA, 20 bp, synthetic construct
  misc_feature 1..20: note = Description of Artificial Sequence: Synthetic oligonucleotide
  source 1..20: mol_type = other DNA
tccatgtcggtcctgatgct

SEQ ID NO: 43 - DNA, 20 bp, synthetic construct
  misc_feature 1..20: note = Description of Artificial Sequence: Synthetic oligonucleotide
  source 1..20: mol_type = other DNA
tccatgccggtcctgatgct

SEQ ID NO: 44 - DNA, 20 bp, synthetic construct
  misc_feature 1..20: note = Description of Artificial Sequence: Synthetic oligonucleotide
  source 1..20: mol_type = other DNA
tccatggcggtcctgatgct

SEQ ID NO: 45 - DNA, 20 bp, synthetic construct
  misc_feature 1..20: note = Description of Artificial Sequence: Synthetic oligonucleotide
  source 1..20: mol_type = other DNA
tccatgacggtcctgatgct

SEQ ID NO: 46 - DNA, 20 bp, synthetic construct
  misc_feature 1..20: note = Description of Artificial Sequence: Synthetic oligonucleotide
  source 1..20: mol_type = other DNA
tccatgtcgatcctgatgct

SEQ ID NO: 47 - DNA, 20 bp, synthetic construct
  misc_feature 1..20: note = Description of Artificial Sequence: Synthetic oligonucleotide
  source 1..20: mol_type = other DNA
tccatgtcgctcctgatgct

SEQ ID NO: 48 - DNA, 20 bp, synthetic construct
  misc_feature 1..20: note = Description of Artificial Sequence: Synthetic oligonucleotide
  source 1..20: mol_type = other DNA
tccatgtcgttcctgatgct

SEQ ID NO: 49 - DNA, 20 bp, synthetic construct
  misc_feature 1..20: note = Description of Artificial Sequence: Synthetic oligonucleotide
  source 1..20: mol_type = other DNA
tccataacgttcctgatgct

SEQ ID NO: 50 - DNA, 20 bp, synthetic construct
  misc_feature 1..20: note = Description of Artificial Sequence: Synthetic oligonucleotide
  source 1..20: mol_type = other DNA
tccatgacgtccctgatgct

SEQ ID NO: 51 - DNA, 20 bp, synthetic construct
  misc_feature 1..20: note = Description of Artificial Sequence: Synthetic oligonucleotide
  source 1..20: mol_type = other DNA
tccatcacgtgcctgatgct

SEQ ID NO: 52 - DNA, 19 bp, synthetic construct
  misc_feature 1..19: note = Description of Artificial Sequence: Synthetic oligonucleotide
  source 1..19: mol_type = other DNA
ggggtcaacgttgacgggg

SEQ ID NO: 53 - DNA, 19 bp, synthetic construct
  misc_feature 1..19: note = Description of Artificial Sequence: Synthetic oligonucleotide
  source 1..19: mol_type = other DNA
ggggtcagtcgtgacgggg

SEQ ID NO: 54 - DNA, 15 bp, synthetic construct
  misc_feature 1..15: note = Description of Artificial Sequence: Synthetic oligonucleotide
  source 1..15: mol_type = other DNA
gctagacgttagtgt

SEQ ID NO: 55 - DNA, 15 bp, synthetic construct
  misc_feature 1..15: note = Description of Artificial Sequence: Synthetic oligonucleotide
  source 1..15: mol_type = other DNA
gctagacgttagtgt

SEQ ID NO: 56 - DNA, 20 bp, synthetic construct
  misc_feature 1..20: note = Description of Artificial Sequence: Synthetic oligonucleotide
  source 1..20: mol_type = other DNA
tccatgtcgttcctgatgct

SEQ ID NO: 57 - DNA, 20 bp, synthetic construct
  misc_feature 1..20: note = Description of Artificial Sequence: Synthetic oligonucleotide
  source 1..20: mol_type = other DNA
tccatgtcgttcctgatgct

SEQ ID NO: 58 - DNA, 24 bp, synthetic construct
  misc_feature 1..24: note = Description of Artificial Sequence: Synthetic oligonucleotide
  source 1..24: mol_type = other DNA
accatggacgatctgtttcccctc

SEQ ID NO: 59 - DNA, 18 bp, synthetic construct
  misc_feature 1..18: note = Description of Artificial Sequence: Synthetic oligonucleotide
  source 1..18: mol_type = other DNA
tctcccagcgtgcgccat

SEQ ID NO: 60 - DNA, 18 bp, synthetic construct
  misc_feature 1..18: note = Description of Artificial Sequence: Synthetic oligonucleotide
  source 1..18: mol_type = other DNA
taccgcgtgcgaccctct

SEQ ID NO: 61 - DNA, 24 bp, synthetic construct
  misc_feature 1..24: note = Description of Artificial Sequence: Synthetic oligonucleotide
  source 1..24: mol_type = other DNA
accatggacgaactgtttcccctc

SEQ ID NO: 62 - DNA, 24 bp, synthetic construct
  misc_feature 1..24: note = Description of Artificial Sequence: Synthetic oligonucleotide
  source 1..24: mol_type = other DNA
accatggacgagctgtttcccctc

SEQ ID NO: 63 - DNA, 24 bp, synthetic construct
  misc_feature 1..24: note = Description of Artificial Sequence: Synthetic oligonucleotide
  source 1..24: mol_type = other DNA
accatggacgacctgtttcccctc

SEQ ID NO: 64 - DNA, 24 bp, synthetic construct
  misc_feature 1..24: note = Description of Artificial Sequence: Synthetic oligonucleotide
  source 1..24: mol_type = other DNA
accatggacgtactgtttcccctc

SEQ ID NO: 65 - DNA, 24 bp, synthetic construct
  misc_feature 1..24: note = Description of Artificial Sequence: Synthetic oligonucleotide
  source 1..24: mol_type = other DNA
accatggacggtctgtttcccctc

SEQ ID NO: 66 - DNA, 24 bp, synthetic construct
  misc_feature 1..24: note = Description of Artificial Sequence: Synthetic oligonucleotide
  source 1..24: mol_type = other DNA
accatggacgttctgtttcccctc

SEQ ID NO: 67 - DNA, 15 bp, synthetic construct
  misc_feature 1..15: note = Description of Artificial Sequence: Synthetic oligonucleotide
  source 1..15: mol_type = other DNA
cacgttgaggggcat

SEQ ID NO: 68 - DNA, 15 bp, synthetic construct
  misc_feature 1..15: note = Description of Artificial Sequence: Synthetic oligonucleotide
  source 1..15: mol_type = other DNA
ctgctgagactggag

SEQ ID NO: 69 - DNA, 12 bp, synthetic construct
  misc_feature 1..12: note = Description of Artificial Sequence: Synthetic oligonucleotide
  source 1..12: mol_type = other DNA
tcagcgtgcgcc

SEQ ID NO: 70 - DNA, 17 bp, synthetic construct
  misc_feature 1..17: note = Description of Artificial Sequence: Synthetic oligonucleotide
  source 1..17: mol_type = other DNA
atgacgttcctgacgtt

SEQ ID NO: 71 - DNA, 17 bp, synthetic construct
  misc_feature 1..17: note = Description of Artificial Sequence: Synthetic oligonucleotide
  source 1..17: mol_type = other DNA
tctcccagcgggcgcat

SEQ ID NO: 72 - DNA, 18 bp, synthetic construct
  misc_feature 1..18: note = Description of Artificial Sequence: Synthetic oligonucleotide
  source 1..18: mol_type = other DNA
tctcccagcgcgcgccat

SEQ ID NO: 73 - DNA, 20 bp, synthetic construct
  misc_feature 1..20: note = Description of Artificial Sequence: Synthetic oligonucleotide
  source 1..20: mol_type = other DNA
tccatgtcgttcctgtcgtt

SEQ ID NO: 74 - DNA, 20 bp, synthetic construct
  misc_feature 1..20: note = Description of Artificial Sequence: Synthetic oligonucleotide
  source 1..20: mol_type = other DNA
tccatagcgttcctagcgtt

SEQ ID NO: 75 - DNA, 21 bp, synthetic construct
  misc_feature 1..21: note = Description of Artificial Sequence: Synthetic oligonucleotide
  source 1..21: mol_type = other DNA
tcgtcgctgtctccgcttctt

SEQ ID NO: 76 - DNA, 19 bp, synthetic construct
  misc_feature 1..19: note = Description of Artificial Sequence: Synthetic oligonucleotide
  source 1..19: mol_type = other DNA
tcctgacgttcctgacgtt

SEQ ID NO: 77 - DNA, 19 bp, synthetic construct
  misc_feature 1..19: note = Description of Artificial Sequence: Synthetic oligonucleotide
  source 1..19: mol_type = other DNA
tcctgtcgttcctgtcgtt

SEQ ID NO: 78 - DNA, 20 bp, synthetic construct
  misc_feature 1..20: note = Description of Artificial Sequence: Synthetic oligonucleotide
  source 1..20: mol_type = other DNA
tccatgtcgtttttgtcgtt

SEQ ID NO: 79 - DNA, 20 bp, synthetic construct
  misc_feature 1..20: note = Description of Artificial Sequence: Synthetic oligonucleotide
  source 1..20: mol_type = other DNA
tcctgtcgttccttgtcgtt

SEQ ID NO: 80 - DNA, 20 bp, synthetic construct
  misc_feature 1..20: note = Description of Artificial Sequence: Synthetic oligonucleotide
  source 1..20: mol_type = other DNA
tccttgtcgttcctgtcgtt

SEQ ID NO: 81 - DNA, 20 bp, synthetic construct
  misc_feature 1..20: note = Description of Artificial Sequence: Synthetic oligonucleotide
  source 1..20: mol_type = other DNA
tcctgtcgttttttgtcgtt

SEQ ID NO: 82 - DNA, 21 bp, synthetic construct
  misc_feature 1..21: note = Description of Artificial Sequence: Synthetic oligonucleotide
  source 1..21: mol_type = other DNA
tcgtcgctgtctgcccttctt

SEQ ID NO: 83 - DNA, 21 bp, synthetic construct
  misc_feature 1..21: note = Description of Artificial Sequence: Synthetic oligonucleotide
  source 1..21: mol_type = other DNA
tcgtcgctgttgtcgtttctt

SEQ ID NO: 84 - DNA, 20 bp, synthetic construct
  misc_feature 1..20: note = Description of Artificial Sequence: Synthetic oligonucleotide
  source 1..20: mol_type = other DNA
tccatgtcgttcctgtcgtt

SEQ ID NO: 85 - DNA, 20 bp, synthetic construct
  misc_feature 1..20: note = Description of Artificial Sequence: Synthetic oligonucleotide
  source 1..20: mol_type = other DNA
tccaggacttctctcaggtt

SEQ ID NO: 86 - DNA, 20 bp, synthetic construct
  misc_feature 1..20: note = Description of Artificial Sequence: Synthetic oligonucleotide
  source 1..20: mol_type = other DNA
tccatgcgtgcgtgcgtttt

SEQ ID NO: 87 - DNA, 20 bp, synthetic construct
  misc_feature 1..20: note = Description of Artificial Sequence: Synthetic oligonucleotide
  source 1..20: mol_type = other DNA
tccatgcgttgcgttgcgtt

SEQ ID NO: 88 - DNA, 20 bp, synthetic construct
  misc_feature 1..20: note = Description of Artificial Sequence: Synthetic oligonucleotide
  source 1..20: mol_type = other DNA
tccacgacgttttcgacgtt

SEQ ID NO: 89 - DNA, 20 bp, synthetic construct
  misc_feature 1..20: note = Description of Artificial Sequence: Synthetic oligonucleotide
  source 1..20: mol_type = other DNA
tcgtcgttgtcgttgtcgtt

SEQ ID NO: 90 - DNA, 24 bp, synthetic construct
  misc_feature 1..24: note = Description of Artificial Sequence: Synthetic oligonucleotide
  source 1..24: mol_type = other DNA
tcgtcgttttgtcgttttgtcgtt

SEQ ID NO: 91 - DNA, 22 bp, synthetic construct
  misc_feature 1..22: note = Description of Artificial Sequence: Synthetic oligonucleotide
  source 1..22: mol_type = other DNA
tcgtcgttgtcgttttgtcgtt

SEQ ID NO: 92 - DNA, 21 bp, synthetic construct
  misc_feature 1..21: note = Description of Artificial Sequence: Synthetic oligonucleotide
  source 1..21: mol_type = other DNA
gcgtgcgttgtcgttgtcgtt

SEQ ID NO: 93 - DNA, 20 bp, synthetic construct
  misc_feature 1..20: note = Description of Artificial Sequence: Synthetic oligonucleotide
  source 1..20: mol_type = other DNA
gcggcgggcggcgcgcgccc

SEQ ID NO: 94 - DNA, 21 bp, synthetic construct
  misc_feature 1..21: note = Description of Artificial Sequence: Synthetic oligonucleotide
  source 1..21: mol_type = other DNA
tgtcgtttgtcgtttgtcgtt

SEQ ID NO: 95 - DNA, 25 bp, synthetic construct
  misc_feature 1..25: note = Description of Artificial Sequence: Synthetic oligonucleotide
  source 1..25: mol_type = other DNA
tgtcgttgtcgttgtcgttgtcgtt

SEQ ID NO: 96 - DNA, 19 bp, synthetic construct
  misc_feature 1..19: note = Description of Artificial Sequence: Synthetic oligonucleotide
  source 1..19: mol_type = other DNA
tgtcgttgtcgttgtcgtt

SEQ ID NO: 97 - DNA, 14 bp, synthetic construct
  misc_feature 1..14: note = Description of Artificial Sequence: Synthetic oligonucleotide
  source 1..14: mol_type = other DNA
tcgtcgtcgtcgtt

SEQ ID NO: 98 - DNA, 13 bp, synthetic construct
  misc_feature 1..13: note = Description of Artificial Sequence: Synthetic oligonucleotide
  source 1..13: mol_type = other DNA
tgtcgttgtcgtt

SEQ ID NO: 99 - DNA, 20 bp, synthetic construct
  misc_feature 1..20: note = Description of Artificial Sequence: Synthetic oligonucleotide
  source 1..20: mol_type = other DNA
tccatagcgttcctagcgtt

SEQ ID NO: 100 - DNA, 20 bp, synthetic construct
  misc_feature 1..20: note = Description of Artificial Sequence: Synthetic oligonucleotide
  source 1..20: mol_type = other DNA
tccatgacgttcctgacgtt

SEQ ID NO: 101-102 - skipped (2 entries)

SEQ ID NO: 103 - DNA, 20 bp, synthetic construct
  misc_feature 1..20: note = Description of Artificial Sequence: Synthetic oligonucleotide
  source 1..20: mol_type = other DNA
tccatgagcttcctgagtct

SEQ ID NO: 104 - DNA, 18 bp, synthetic construct
  misc_feature 1..18: note = Description of Artificial Sequence: Synthetic oligonucleotide
  source 1..18: mol_type = other DNA
tctcccagcgtgcgccat

SEQ ID NO: 105 - DNA, 20 bp, synthetic construct
  misc_feature 1..20: note = Description of Artificial Sequence: Synthetic oligonucleotide
  source 1..20: mol_type = other DNA
tccatgacgttcctgacgtt

SEQ ID NO: 106 - DNA, 20 bp, synthetic construct
  misc_feature 1..20: note = Description of Artificial Sequence: Synthetic oligonucleotide
  source 1..20: mol_type = other DNA
gcctcagtctgcttcgcacc

SEQ ID NO: 107 - DNA, 13 bp, synthetic construct
  misc_feature 1..13: note = Description of Artificial Sequence: Synthetic oligonucleotide
  source 1..13: mol_type = other DNA
aatcgatcgatcg

SEQ ID NO: 108 - DNA, 12 bp, synthetic construct
  misc_feature 1..12: note = Description of Artificial Sequence: Synthetic oligonucleotide
  source 1..12: mol_type = other DNA
cagtctgcttcg

SEQ ID NO: 109 - DNA, 15 bp, synthetic construct
  misc_feature 1..15: note = Description of Artificial Sequence: Synthetic oligonucleotide
  source 1..15: mol_type = other DNA
ctcagtctgcttcgc

SEQ ID NO: 110 - DNA, 20 bp, synthetic construct
  misc_feature 1..20: note = Description of Combined DNA/RNA Molecule: Synthetic oligonucleotide
  modified_base 8: mod_base = OTHER; note = uracil
  modified_base 10: mod_base = OTHER; note = uracil
  source 1..20: mol_type = other DNA
gcctcagtctgcttcgcacc

SEQ ID NO: 111 - RNA, 20 nt, synthetic construct
  misc_feature 1..20: note = Description of Artificial Sequence: Synthetic oligonucleotide
  source 1..20: mol_type = other RNA
gcctcagtctgcttcgcacc

SEQ ID NO: 112 - DNA, 20 bp, synthetic construct
  misc_feature 1..20: note = Description of Combined DNA/RNA Molecule: Synthetic oligonucleotide
  variation 4: note = t or u
  modified_base 4: mod_base = OTHER; note = uracil
  variation 8: note = t or u
  modified_base 8: mod_base = OTHER; note = uracil
  variation 10: note = t or u
  modified_base 10: mod_base = OTHER; note = uracil
  variation 13..14: note = t or u
  modified_base 13..14: mod_base = OTHER; note = uracil
  source 1..20: mol_type = other DNA
gcctcagtctgcttcgcacc

SEQ ID NO: 113 - DNA, 20 bp, synthetic construct
  misc_feature 1..20: note = Description of Combined DNA/RNA Molecule: Synthetic oligonucleotide
  modified_base 4: mod_base = OTHER; note = uracil
  source 1..20: mol_type = other DNA
gcctcagtctgcttcgcacc

SEQ ID NO: 114 - RNA, 20 nt, synthetic construct
  misc_feature 1..20: note = Description of Artificial Sequence: Synthetic oligonucleotide
  source 1..20: mol_type = other RNA
ggtgcgaagcagactgaggc

SEQ ID NO: 115 - DNA, 20 bp, synthetic construct
  misc_feature 1..20: note = Description of Artificial Sequence: Synthetic oligonucleotide
  source 1..20: mol_type = other DNA
gatgcctctcctacgcgcct

SEQ ID NO: 116 - DNA, 24 bp, synthetic construct
  misc_feature 1..24: note = Description of Artificial Sequence: Synthetic primer
  source 1..24: mol_type = other DNA
agccttggtggataccctgaagtt

SEQ ID NO: 117 - DNA, 24 bp, synthetic construct
  misc_feature 1..24: note = Description of Artificial Sequence: Synthetic primer
  source 1..24: mol_type = other DNA
tggacaaggtcatactctgccgat

SEQ ID NO: 118 - DNA, 20 bp, synthetic construct
  misc_feature 1..20: note = Description of Artificial Sequence: Synthetic primer
  source 1..20: mol_type = other DNA
ctctgctcctcctgttcgac

SEQ ID NO: 119 - DNA, 20 bp, synthetic construct
  misc_feature 1..20: note = Description of Artificial Sequence: Synthetic primer
  source 1..20: mol_type = other DNA
acgaccaaatccgttgactc

SEQ ID NO: 120 - DNA, 20 bp, synthetic construct
  misc_feature 1..20: note = Description of Artificial Sequence: Synthetic oligonucleotide
  source 1..20: mol_type = other DNA
gtccctgaagatgtcaatgc

SEQ ID NO: 121 - DNA, 21 bp, synthetic construct
  misc_feature 1..21: note = Description of Combined DNA/RNA Molecule: Synthetic oligonucleotide
  modified_base 1..2: mod_base = OTHER; note = uracil
  modified_base 4: mod_base = OTHER; note = uracil
  modified_base 10: mod_base = OTHER; note = uracil
  modified_base 12..15: mod_base = OTHER; note = uracil
  modified_base 18..19: mod_base = OTHER; note = uracil
  source 1..21: mol_type = other DNA
ttctagacctgttttgctttt

SEQ ID NO: 122 - DNA, 21 bp, synthetic construct
  misc_feature 1..21: note = Description of Combined DNA/RNA Molecule: Synthetic oligonucleotide
  modified_base 13: mod_base = OTHER; note = uracil
  modified_base 15: mod_base = OTHER; note = uracil
  source 1..21: mol_type = other DNA
aagcaaaacaggtctagaatt

SEQ ID NO: 123 - DNA, 20 bp, synthetic construct
  misc_feature 1..20: note = Description of Combined DNA/RNA Molecule: Synthetic oligonucleotide
  modified_base 12: mod_base = OTHER; note = uracil
  modified_base 14: mod_base = OTHER; note = uracil
  source 1..20: mol_type = other DNA
agcaaaacaggtctagaatt

SEQ ID NO: 124 - RNA, 10 nt, synthetic construct
  misc_feature 1..10: note = Description of Artificial Sequence: Synthetic oligonucleotide
  source 1..10: mol_type = other RNA
ggtggaaggc

SEQ ID NO: 125 - DNA, 12 bp, synthetic construct
  misc_feature 1..12: note = Description of Artificial Sequence: Synthetic oligonucleotide
  source 1..12: mol_type = other DNA
cagtctgcttcg

SEQ ID NO: 126 - DNA, 27 bp, synthetic construct
  misc_feature 1..27: note = Description of Artificial Sequence: Synthetic oligonucleotide
  source 1..27: mol_type = other DNA
gcgtttgctcttcttcttgcgtttttt

SEQ ID NO: 127 - DNA, 19 bp, synthetic construct
  misc_feature 1..19: note = Description of Artificial Sequence: Synthetic oligonucleotide
  source 1..19: mol_type = other DNA
cgtgggctccagcattcta

SEQ ID NO: 128 - DNA, 21 bp, synthetic construct
  misc_feature 1..21: note = Description of Artificial Sequence: Synthetic oligonucleotide
  source 1..21: mol_type = other DNA
agtcatttctgcctttgcgtc

SEQ ID NO: 129 - DNA, 22 bp, synthetic construct
  misc_feature 1..22: note = Description of Artificial Sequence: Synthetic oligonucleotide
  source 1..22: mol_type = other DNA
ccaatggtcgggcactgctcaa

SEQ ID NO: 130 - DNA, 20 bp, synthetic construct
  misc_feature 1..20: note = Description of Artificial Sequence: Synthetic oligonucleotide
  source 1..20: mol_type = other DNA
ggcaaattcaacggcacagt

SEQ ID NO: 131 - DNA, 20 bp, synthetic construct
  misc_feature 1..20: note = Description of Artificial Sequence: Synthetic oligonucleotide
  source 1..20: mol_type = other DNA
gggtctcgctcctggaagat

SEQ ID NO: 132 - DNA, 27 bp, synthetic construct
  misc_feature 1..27: note = Description of Artificial Sequence: Synthetic oligonucleotide
  source 1..27: mol_type = other DNA
aaggccgagaatgggaagcttgtcatc

SEQ ID NO: 133 - DNA, 21 bp, synthetic construct
  misc_feature 1..21: note = Description of Combined DNA/RNA Molecule: Synthetic oligonucleotide
  modified_base 10..12: mod_base = OTHER; note = uracil
  modified_base 15: mod_base = OTHER; note = uracil
  modified_base 17: mod_base = OTHER; note = uracil
  source 1..21: mol_type = other DNA
acaacagactttaatgtaatt

SEQ ID NO: 134 - RNA, 19 nt, synthetic construct
  misc_feature 1..19: note = Description of Artificial Sequence: Synthetic oligonucleotide
  source 1..19: mol_type = other RNA
acaactgactttaatgtaa

SEQ ID NO: 135 - protein, 33 aa, synthetic construct
  REGION 1..33: note = Description of Artificial Sequence: Synthetic polypeptide
GLFEAIEGFIENGWEGMIDGWYGYGRKKRRQRR

SEQ ID NO: 136 - RNA, 21 nt, synthetic construct
  misc_feature 1..21: note = Description of Artificial Sequence: Synthetic oligonucleotide
  source 1..21: mol_type = other RNA
ttacattaaagtctgttgttt

SEQ ID NO: 137 - RNA, 21 nt, synthetic construct
  misc_feature 1..21: note = Description of Artificial Sequence: Synthetic oligonucleotide
  source 1..21: mol_type = other RNA
atttcaggaattgttaaagtt

SEQ ID NO: 138 - RNA, 21 nt, synthetic construct
  misc_feature 1..21: note = Description of Artificial Sequence: Synthetic oligonucleotide
  source 1..21: mol_type = other RNA
tgacattaaagtctgttgttt

SEQ ID NO: 139 - DNA, 21 bp, synthetic construct
  misc_feature 1..21: note = Description of Combined DNA/RNA Molecule: Synthetic oligonucleotide
  modified_base 1: mod_base = OTHER; note = uracil
  modified_base 6: mod_base = OTHER; note = uracil
  modified_base 8..9: mod_base = OTHER; note = uracil
  modified_base 12: mod_base = OTHER; note = uracil
  source 1..21: mol_type = other DNA
taaaatcttcctgcccacctt

SEQ ID NO: 140 - DNA, 21 bp, synthetic construct
  misc_feature 1..21: note = Description of Combined DNA/RNA Molecule: Synthetic oligonucleotide
  modified_base 7: mod_base = OTHER; note = uracil
  modified_base 9..10: mod_base = OTHER; note = uracil
  modified_base 14: mod_base = OTHER; note = uracil
  source 1..21: mol_type = other DNA
ggaagctgttggctgaaaatt

SEQ ID NO: 141 - DNA, 21 bp, synthetic construct
  misc_feature 1..21: note = Description of Combined DNA/RNA Molecule: Synthetic oligonucleotide
  modified_base 5: mod_base = OTHER; note = uracil
  modified_base 14: mod_base = OTHER; note = uracil
  modified_base 16: mod_base = OTHER; note = uracil
  modified_base 18: mod_base = OTHER; note = uracil
  source 1..21: mol_type = other DNA
cacatccagcccatctgtctt

SEQ ID NO: 142 - DNA, 21 bp, synthetic construct
  misc_feature 1..21: note = Description of Combined DNA/RNA Molecule: Synthetic oligonucleotide
  modified_base 4: mod_base = OTHER; note = uracil
  modified_base 7: mod_base = OTHER; note = uracil
  modified_base 10: mod_base = OTHER; note = uracil
  modified_base 16: mod_base = OTHER; note = uracil
  source 1..21: mol_type = other DNA
ccgtgctcctggggctgggtt

SEQ ID NO: 143 - DNA, 21 bp, synthetic construct
  misc_feature 1..21: note = Description of Combined DNA/RNA Molecule: Synthetic oligonucleotide
  modified_base 5..6: mod_base = OTHER; note = uracil
  modified_base 10: mod_base = OTHER; note = uracil
  modified_base 12: mod_base = OTHER; note = uracil
  modified_base 14: mod_base = OTHER; note = uracil
  source 1..21: mol_type = other DNA
ggagttggatctctcagaatt

SEQ ID NO: 144 - DNA, 21 bp, synthetic construct
  misc_feature 1..21: note = Description of Artificial Sequence: Synthetic oligonucleotide
  source 1..21: mol_type = other DNA
aagtcccgctcattacaaatt

SEQ ID NO: 145 - RNA, 21 nt, synthetic construct
  misc_feature 1..21: note = Description of Artificial Sequence: Synthetic oligonucleotide
  source 1..21: mol_type = other RNA
aagaccagcctctttgcccag

SEQ ID NO: 146 - DNA, 19 bp, synthetic construct
  misc_feature 1..19: note = Description of Artificial Sequence: Synthetic oligonucleotide
  source 1..19: mol_type = other DNA
ggaccaggcagaaaacgag

SEQ ID NO: 147 - RNA, 17 nt, synthetic construct
  misc_feature 1..17: note = Description of Artificial Sequence: Synthetic oligonucleotide
  source 1..17: mol_type = other RNA
ctatcaggatgacgcgg

SEQ ID NO: 148 - DNA, 23 bp, synthetic construct
  misc_feature 1..23: note = Description of Combined DNA/RNA Molecule: Synthetic oligonucleotide
  modified_base 8: mod_base = OTHER; note = uracil
  modified_base 16: mod_base = OTHER; note = uracil
  modified_base 18..19: mod_base = OTHER; note = uracil
  modified_base 21: mod_base = OTHER; note = uracil
  source 1..23: mol_type = other DNA
aaccacctgggccagtattattt

SEQ ID NO: 149 - RNA, 21 nt, synthetic construct
  misc_feature 1..21: note = Description of Artificial Sequence: Synthetic oligonucleotide
  source 1..21: mol_type = other RNA
tgacacaggcaggcttgactt

SEQ ID NO: 150 - RNA, 21 nt, synthetic construct
  misc_feature 1..21: note = Description of Artificial Sequence: Synthetic oligonucleotide
  source 1..21: mol_type = other RNA
aagctcaattcggacaacaag

SEQ ID NO: 151 - RNA, 21 nt, synthetic construct
  misc_feature 1..21: note = Description of Artificial Sequence: Synthetic oligonucleotide
  source 1..21: mol_type = other RNA
aagtcctgtatgagtgggaac

SEQ ID NO: 152 - DNA, 59 bp, synthetic construct
  misc_feature 1..59: note = Description of Artificial Sequence: Synthetic oligonucleotide
  source 1..59: mol_type = other DNA
tcgacgaacatctacaacgcctgcttcaagagagcaggcgttgtagatgttcttttttt

SEQ ID NO: 153 - DNA, 59 bp, synthetic construct
  misc_feature 1..59: note = Description of Artificial Sequence: Synthetic oligonucleotide
  source 1..59: mol_type = other DNA
tcgaccaatgacaagagccgtgacttcaagagagtcacggctcttgtcattgttttttt

SEQ ID NO: 154 - DNA, 19 bp, synthetic construct
  misc_feature 1..19: note = Description of Artificial Sequence: Synthetic oligonucleotide
  source 1..19: mol_type = other DNA
ggtgaagaagggcgtccaa

SEQ ID NO: 155 - DNA, 62 bp, synthetic construct
  misc_feature 1..62: note = Description of Artificial Sequence: Synthetic oligonucleotide
  source 1..62: mol_type = other DNA
gatccgttggagctgttggcgtagttcaagagactacgccaacagctccaactttttggaaa

SEQ ID NO: 156 - DNA, 20 bp, synthetic construct
  misc_feature 1..20: note = Description of Artificial Sequence: Synthetic oligonucleotide
  source 1..20: mol_type = other DNA
aggtggtgttaacagcagag

SEQ ID NO: 157 - DNA, 20 bp, synthetic construct
  misc_feature 1..20: note = Description of Artificial Sequence: Synthetic oligonucleotide
  source 1..20: mol_type = other DNA
aatgttccaatgccccactc

SEQ ID NO: 158 - RNA, 21 nt, synthetic construct
  misc_feature 1..21: note = Description of Artificial Sequence: Synthetic oligonucleotide
  source 1..21: mol_type = other RNA
aactgccagtggccagggcct

SEQ ID NO: 159 - RNA, 21 nt, synthetic construct
  misc_feature 1..21: note = Description of Artificial Sequence: Synthetic oligonucleotide
  source 1..21: mol_type = other RNA
aacctgcggtctggagtcaac

SEQ ID NO: 160 - RNA, 21 nt, synthetic construct
  misc_feature 1..21: note = Description of Artificial Sequence: Synthetic oligonucleotide
  source 1..21: mol_type = other RNA
taatccaattcgaagaccaat

SEQ ID NO: 161 - DNA, 21 bp, synthetic construct
  misc_feature 1..21: note = Description of Artificial Sequence: Synthetic oligonucleotide
  source 1..21: mol_type = other DNA
aggggcagcaactgatgaaaa

SEQ ID NO: 162 - DNA, 21 bp, synthetic construct
  misc_feature 1..21: note = Description of Artificial Sequence: Synthetic oligonucleotide
  source 1..21: mol_type = other DNA
aaggcatcgcagaaggtttat

SEQ ID NO: 163 - RNA, 19 nt, synthetic construct
  misc_feature 1..19: note = Description of Artificial Sequence: Synthetic oligonucleotide
  source 1..19: mol_type = other RNA
tcgaagtactcagcgtaag

SEQ ID NO: 164 - RNA, 19 nt, synthetic construct
  misc_feature 1..19: note = Description of Artificial Sequence: Synthetic oligonucleotide
  source 1..19: mol_type = other RNA
gaacctgaggaccaagaac

SEQ ID NO: 165 - DNA, 29 bp, synthetic construct
  misc_feature 1..29: note = Description of Artificial Sequence: Synthetic oligonucleotide
  source 1..29: mol_type = other DNA
aatgttctcttccaggtcagccctgtctc

SEQ ID NO: 166 - RNA, 21 nt, synthetic construct
  misc_feature 1..21: note = Description of Artificial Sequence: Synthetic oligonucleotide
  source 1..21: mol_type = other RNA
aagaagtacgagaagctggag

SEQ ID NO: 167 - RNA, 21 nt, synthetic construct
  misc_feature 1..21: note = Description of Artificial Sequence: Synthetic oligonucleotide
  source 1..21: mol_type = other RNA
aagcaagctgtagaacacgta

SEQ ID NO: 168 - RNA, 21 nt, synthetic construct
  misc_feature 1..21: note = Description of Artificial Sequence: Synthetic oligonucleotide
  source 1..21: mol_type = other RNA
aagccgtgcaaagaactcttt

SEQ ID NO: 169 - RNA, 21 nt, synthetic construct
  misc_feature 1..21: note = Description of Artificial Sequence: Synthetic oligonucleotide
  source 1..21: mol_type = other RNA
aacagtaggtttgtagtgagc

SEQ ID NO: 170 - RNA, 21 nt, synthetic construct
  misc_feature 1..21: note = Description of Artificial Sequence: Synthetic oligonucleotide
  source 1..21: mol_type = other RNA
aaaggggcatccacagacatc

SEQ ID NO: 171 - DNA, 20 bp, synthetic construct
  misc_feature 1..20: note = Description of Artificial Sequence: Synthetic oligonucleotide
  source 1..20: mol_type = other DNA
ttattcttctctttggagga

SEQ ID NO: 172 - DNA, 19 bp, synthetic construct
  misc_feature 1..19: note = Description of Artificial Sequence: Synthetic oligonucleotide
  source 1..19: mol_type = other DNA
actggacttccagaagaac

SEQ ID NO: 173 - DNA, 21 bp, synthetic construct
  misc_feature 1..21: note = Description of Artificial Sequence: Synthetic oligonucleotide
  source 1..21: mol_type = other DNA
aattgcacgtaatcacccaaa

SEQ ID NO: 174 - DNA, 21 bp, synthetic construct
  misc_feature 1..21: note = Description of Artificial Sequence: Synthetic oligonucleotide
  source 1..21: mol_type = other DNA
aagaaatacaaggaagatgag

SEQ ID NO: 175 - DNA, 21 bp, synthetic construct
  misc_feature 1..21: note = Description of Combined DNA/RNA Molecule: Synthetic oligonucleotide
  modified_base 5: mod_base = OTHER; note = uracil
  modified_base 8..9: mod_base = OTHER; note = uracil
  modified_base 12: mod_base = OTHER; note = uracil
  modified_base 15: mod_base = OTHER; note = uracil
  modified_base 18: mod_base = OTHER; note = uracil
  source 1..21: mol_type = other DNA
gacatgcttgctcatagtctt

SEQ ID NO: 176 - DNA, 21 bp, synthetic construct
  misc_feature 1..21: note = Description of Combined DNA/RNA Molecule: Synthetic oligonucleotide
  modified_base 5: mod_base = OTHER; note = uracil
  modified_base 9: mod_base = OTHER; note = uracil
  modified_base 12: mod_base = OTHER; note = uracil
  modified_base 15: mod_base = OTHER; note = uracil
  modified_base 18: mod_base = OTHER; note = uracil
  source 1..21: mol_type = other DNA
gacctgcctcctcatcgtctt

SEQ ID NO: 177 - DNA, 21 bp, synthetic construct
  misc_feature 1..21: note = Description of Artificial Sequence: Synthetic oligonucleotide
  source 1..21: mol_type = other DNA
aaggtggagcaagcggtggag

SEQ ID NO: 178 - DNA, 21 bp, synthetic construct
  misc_feature 1..21: note = Description of Artificial Sequence: Synthetic oligonucleotide
  source 1..21: mol_type = other DNA
aaggagttgaaggcctacaaa

SEQ ID NO: 179 - DNA, 21 bp, synthetic construct
  misc_feature 1..21: note = Description of Combined DNA/RNA Molecule: Synthetic oligonucleotide
  modified_base 1: mod_base = OTHER; note = uracil
  modified_base 5: mod_base = OTHER; note = uracil
  modified_base 12: mod_base = OTHER; note = uracil
  modified_base 14..15: mod_base = OTHER; note = uracil
  source 1..21: mol_type = other DNA
tgcctacgaactcttcacctt

SEQ ID NO: 180 - DNA, 21 bp, synthetic construct
  misc_feature 1..21: note = Description of Combined DNA/RNA Molecule: Synthetic oligonucleotide
  modified_base 1: mod_base = OTHER; note = uracil
  modified_base 3: mod_base = OTHER; note = uracil
  modified_base 9: mod_base = OTHER; note = uracil
  modified_base 18: mod_base = OTHER; note = uracil
  source 1..21: mol_type = other DNA
tatggagctgcagaggatgtt

SEQ ID NO: 181 - DNA, 19 bp, synthetic construct
  misc_feature 1..19: note = Description of Artificial Sequence: Synthetic oligonucleotide
  source 1..19: mol_type = other DNA
ttggccaagccacacacag

SEQ ID NO: 182 - DNA, 19 bp, synthetic construct
  misc_feature 1..19: note = Description of Artificial Sequence: Synthetic oligonucleotide
  source 1..19: mol_type = other DNA
gttctcagccattgctagc

SEQ ID NO: 183 - DNA, 19 bp, synthetic construct
  misc_feature 1..19: note = Description of Artificial Sequence: Synthetic oligonucleotide
  source 1..19: mol_type = other DNA
ggcagcatgtattgctgag

SEQ ID NO: 184 - RNA, 21 nt, synthetic construct
  misc_feature 1..21: note = Description of Artificial Sequence: Synthetic oligonucleotide
  source 1..21: mol_type = other RNA
aatccaggactcattccagat

SEQ ID NO: 185 - RNA, 21 nt, synthetic construct
  misc_feature 1..21: note = Description of Artificial Sequence: Synthetic oligonucleotide
  source 1..21: mol_type = other RNA
aagtgaagaatacgatcaagt

SEQ ID NO: 186 - RNA, 21 nt, synthetic construct
  misc_feature 1..21: note = Description of Artificial Sequence: Synthetic oligonucleotide
  source 1..21: mol_type = other RNA
aacaacgagtacctcaaccct

SEQ ID NO: 187 - RNA, 21 nt, synthetic construct
  misc_feature 1..21: note = Description of Artificial Sequence: Synthetic oligonucleotide
  source 1..21: mol_type = other RNA
aacgcttgagctggaagtaag

SEQ ID NO: 188 - RNA, 19 nt, synthetic construct
  misc_feature 1..19: note = Description of Artificial Sequence: Synthetic oligonucleotide
  source 1..19: mol_type = other RNA
ccttcaagcttctgatctc

SEQ ID NO: 189 - RNA, 21 nt, synthetic construct
  misc_feature 1..21: note = Description of Artificial Sequence: Synthetic oligonucleotide
  source 1..21: mol_type = other RNA
aacttcgactttgtcaccgag

SEQ ID NO: 190 - RNA, 22 nt, synthetic construct
  misc_feature 1..22: note = Description of Artificial Sequence: Synthetic oligonucleotide
  source 1..22: mol_type = other RNA
aagcactgcagagacatggaag

SEQ ID NO: 191 - DNA, 21 bp, synthetic construct
  misc_feature 1..21: note = Description of Artificial Sequence: Synthetic oligonucleotide
  source 1..21: mol_type = other DNA
aacagccatggatacacttga

SEQ ID NO: 192 - DNA, 20 bp, synthetic construct
  misc_feature 1..20: note = Description of Artificial Sequence: Synthetic oligonucleotide
  source 1..20: mol_type = other DNA
aatgacaaagaggcagcagg

SEQ ID NO: 193 - DNA, 20 bp, synthetic construct
  misc_feature 1..20: note = Description of Artificial Sequence: Synthetic oligonucleotide
  source 1..20: mol_type = other DNA
aacctgccacactcaagatc

SEQ ID NO: 194 - DNA, 21 bp, synthetic construct
  misc_feature 1..21: note = Description of Artificial Sequence: Synthetic oligonucleotide
  source 1..21: mol_type = other DNA
agctgaacttcaggagctgcc

SEQ ID NO: 195 - DNA, 21 bp, synthetic construct
  misc_feature 1..21: note = Description of Artificial Sequence: Synthetic oligonucleotide
  source 1..21: mol_type = other DNA
aagcctttcgcaagttcctga

SEQ ID NO: 196 - DNA, 20 bp, synthetic construct
  misc_feature 1..20: note = Description of Artificial Sequence: Synthetic oligonucleotide
  source 1..20: mol_type = other DNA
acggcataggcgatgaggag

SEQ ID NO: 197 - DNA, 20 bp, synthetic construct
  misc_feature 1..20: note = Description of Artificial Sequence: Synthetic oligonucleotide
  source 1..20: mol_type = other DNA
aggaaggccgggtgattgtg

SEQ ID NO: 198 - DNA, 19 bp, synthetic construct
  misc_feature 1..19: note = Description of Artificial Sequence: Synthetic oligonucleotide
  source 1..19: mol_type = other DNA
gtctggtacgactggagta

SEQ ID NO: 199 - DNA, 20 bp, synthetic construct
  misc_feature 1..20: note = Description of Artificial Sequence: Synthetic oligonucleotide
  source 1..20: mol_type = other DNA
gacagctttaggcacctcta

SEQ ID NO: 200 - RNA, 19 nt, synthetic construct
  misc_feature 1..19: note = Description of Artificial Sequence: Synthetic oligonucleotide
  source 1..19: mol_type = other RNA
ggattcgaactgcacttct

SEQ ID NO: 201 - RNA, 19 nt, synthetic construct
  misc_feature 1..19: note = Description of Artificial Sequence: Synthetic oligonucleotide
  source 1..19: mol_type = other RNA
actgtggcacccagcttgt

SEQ ID NO: 202 - RNA, 19 nt, synthetic construct
  misc_feature 1..19: note = Description of Artificial Sequence: Synthetic oligonucleotide
  source 1..19: mol_type = other RNA
gcccaaagtgaatcccttc

SEQ ID NO: 203 - DNA, 49 bp, synthetic construct
  misc_feature 1..49: note = Description of Artificial Sequence: Synthetic oligonucleotide
  source 1..49: mol_type = other DNA
tttgaatatctgtgctgagaacacagttctcagcacagatattcttttt

SEQ ID NO: 204 - DNA, 49 bp, synthetic construct
  misc_feature 1..49: note = Description of Artificial Sequence: Synthetic oligonucleotide
  source 1..49: mol_type = other DNA
tttgtcaattagctggaacatcacagatgttccagctaattgacttttt

SEQ ID NO: 205 - DNA, 29 bp, synthetic construct
  misc_feature 1..29: note = Description of Artificial Sequence: Synthetic oligonucleotide
  source 1..29: mol_type = other DNA
aatgagaaaagcaaaaggtgccctgtctc

SEQ ID NO: 206 - RNA, 22 nt, synthetic construct
  misc_feature 1..22: note = Description of Artificial Sequence: Synthetic oligonucleotide
  source 1..22: mol_type = other RNA
catcgatgtgtgtgagaactgc

SEQ ID NO: 207 - RNA, 22 nt, synthetic construct
  misc_feature 1..22: note = Description of Artificial Sequence: Synthetic oligonucleotide
  source 1..22: mol_type = other RNA
ctgttctcagctggagaagctt

SEQ ID NO: 208 - RNA, 22 nt, synthetic construct
  misc_feature 1..22: note = Description of Artificial Sequence: Synthetic oligonucleotide
  source 1..22: mol_type = other RNA
ggagccttcatggtaagggatt

SEQ ID NO: 209 - DNA, 15 bp, synthetic construct
  misc_feature 1..15: note = Description of Artificial Sequence: Synthetic oligonucleotide
  source 1..15: mol_type = other DNA
ggcaccatgaaggcg

SEQ ID NO: 210 - DNA, 21 bp, synthetic construct
  misc_feature 1..21: note = Description of Combined DNA/RNA Molecule: Synthetic oligonucleotide
  modified_base 2: mod_base = OTHER; note = uracil
  modified_base 7: mod_base = OTHER; note = uracil
  modified_base 9: mod_base = OTHER; note = uracil
  modified_base 12..14: mod_base = OTHER; note = uracil
  modified_base 16: mod_base = OTHER; note = uracil
  modified_base 18: mod_base = OTHER; note = uracil
  source 1..21: mol_type = other DNA
ctgggctgtactttgtatatt

SEQ ID NO: 211 - RNA, 21 nt, synthetic construct
  misc_feature 1..21: note = Description of Artificial Sequence: Synthetic oligonucleotide
  source 1..21: mol_type = other RNA
atgtagcctggagatccattt

SEQ ID NO: 212 - DNA, 23 bp, synthetic construct
  misc_feature 1..23: note = Description of Combined DNA/RNA Molecule: Synthetic oligonucleotide
  modified_base 3: mod_base = OTHER; note = uracil
  modified_base 19: mod_base = OTHER; note = uracil
  modified_base 21: mod_base = OTHER; note = uracil
  source 1..23: mol_type = other DNA
cctcagggcagagaaccatcttt

SEQ ID NO: 213 - DNA, 23 bp, synthetic construct
  misc_feature 1..23: note = Description of Combined DNA/RNA Molecule: Synthetic oligonucleotide
  modified_base 2: mod_base = OTHER; note = uracil
  modified_base 7..8: mod_base = OTHER; note = uracil
  modified_base 20: mod_base = OTHER; note = uracil
  source 1..23: mol_type = other DNA
ctggacttccagaagaacatctt

SEQ ID NO: 214 - RNA, 21 nt, synthetic construct
  misc_feature 1..21: note = Description of Artificial Sequence: Synthetic oligonucleotide
  source 1..21: mol_type = other RNA
aagatccgccagagcccctcg

SEQ ID NO: 215 - DNA, 21 bp, synthetic construct
  misc_feature 1..21: note = Description of Artificial Sequence: Synthetic oligonucleotide
  source 1..21: mol_type = other DNA
aacagggactcacgtgaagct

SEQ ID NO: 216 - DNA, 21 bp, synthetic construct
  misc_feature 1..21: note = Description of Artificial Sequence: Synthetic oligonucleotide
  source 1..21: mol_type = other DNA
aagacctgtttgatctgatcc

SEQ ID NO: 217 - DNA, 21 bp, synthetic construct
  misc_feature 1..21: note = Description of Combined DNA/RNA Molecule: Synthetic oligonucleotide
  modified_base 1: mod_base = OTHER; note = uracil
  modified_base 6: mod_base = OTHER; note = uracil
  modified_base 15: mod_base = OTHER; note = uracil
  source 1..21: mol_type = other DNA
tagactgacccagctggaatt

SEQ ID NO: 218 - DNA, 21 bp, synthetic construct
  misc_feature 1..21: note = Description of Combined DNA/RNA Molecule: Synthetic oligonucleotide
  modified_base 3: mod_base = OTHER; note = uracil
  modified_base 8..9: mod_base = OTHER; note = uracil
  source 1..21: mol_type = other DNA
gatgcaattacacaacagatt

SEQ ID NO: 219 - RNA, 19 nt, synthetic construct
  misc_feature 1..19: note = Description of Artificial Sequence: Synthetic oligonucleotide
  source 1..19: mol_type = other RNA
ctcaggagaggagccattt

SEQ ID NO: 220 - RNA, 19 nt, synthetic construct
  misc_feature 1..19: note = Description of Artificial Sequence: Synthetic oligonucleotide
  source 1..19: mol_type = other RNA
gattgaagacacaggaggc

SEQ ID NO: 221 - RNA, 19 nt, synthetic construct
  misc_feature 1..19: note = Description of Artificial Sequence: Synthetic oligonucleotide
  source 1..19: mol_type = other RNA
gcaactctggatgggattg

SEQ ID NO: 222 - RNA, 19 nt, synthetic construct
  misc_feature 1..19: note = Description of Artificial Sequence: Synthetic oligonucleotide
  source 1..19: mol_type = other RNA
ggagttcatgagtgctata

SEQ ID NO: 223 - RNA, 19 nt, synthetic construct
  misc_feature 1..19: note = Description of Artificial Sequence: Synthetic oligonucleotide
  source 1..19: mol_type = other RNA
cagaggaacctgctggcga

SEQ ID NO: 224 - DNA, 21 bp, synthetic construct
  misc_feature 1..21: note = Description of Artificial Sequence: Synthetic oligonucleotide
  source 1..21: mol_type = other DNA
aactggcaacctccagagaat

SEQ ID NO: 225 - DNA, 21 bp, synthetic construct
  misc_feature 1..21: note = Description of Artificial Sequence: Synthetic oligonucleotide
  source 1..21: mol_type = other DNA
aagagacctcgtggagaaact

SEQ ID NO: 226 - DNA, 21 bp, synthetic construct
  misc_feature 1..21: note = Description of Artificial Sequence: Synthetic oligonucleotide
  source 1..21: mol_type = other DNA
aacagtagaggagccgtcaaa

SEQ ID NO: 227 - DNA, 21 bp, synthetic construct
  misc_feature 1..21: note = Description of Combined DNA/RNA Molecule: Synthetic oligonucleotide
  modified_base 4: mod_base = OTHER; note = uracil
  modified_base 12: mod_base = OTHER; note = uracil
  modified_base 14..15: mod_base = OTHER; note = uracil
  modified_base 18: mod_base = OTHER; note = uracil
  source 1..21: mol_type = other DNA
gggtgagaccatcttcatctt

SEQ ID NO: 228 - DNA, 21 bp, synthetic construct
  misc_feature 1..21: note = Description of Combined DNA/RNA Molecule: Synthetic oligonucleotide
  modified_base 9: mod_base = OTHER; note = uracil
  modified_base 11: mod_base = OTHER; note = uracil
  modified_base 13: mod_base = OTHER; note = uracil
  modified_base 19: mod_base = OTHER; note = uracil
  source 1..21: mol_type = other DNA
ggccaaagtctatgaagattt

SEQ ID NO: 229 - RNA, 21 nt, synthetic construct
  misc_feature 1..21: note = Description of Artificial Sequence: Synthetic oligonucleotide
  source 1..21: mol_type = other RNA
aatcatcatcaagaaagggca

SEQ ID NO: 230 - DNA, 21 bp, synthetic construct
  misc_feature 1..21: note = Description of Combined DNA/RNA Molecule: Synthetic oligonucleotide
  modified_base 3..4: mod_base = OTHER; note = uracil
  modified_base 7: mod_base = OTHER; note = uracil
  modified_base 13: mod_base = OTHER; note = uracil
  modified_base 18..19: mod_base = OTHER; note = uracil
  source 1..21: mol_type = other DNA
aattgctggagctggcctttt

SEQ ID NO: 231 - DNA, 19 bp, synthetic construct
  misc_feature 1..19: note = Description of Artificial Sequence: Synthetic oligonucleotide
  source 1..19: mol_type = other DNA
gaatgaagatcgatagtaa

SEQ ID NO: 232 - DNA, 19 bp, synthetic construct
  misc_feature 1..19: note = Description of Artificial Sequence: Synthetic oligonucleotide
  source 1..19: mol_type = other DNA
gcacaggtgtagcaagtaa

SEQ ID NO: 233 - DNA, 19 bp, synthetic construct
  misc_feature 1..19: note = Description of Artificial Sequence: Synthetic oligonucleotide
  source 1..19: mol_type = other DNA
ggagaattatgctttgaaa

SEQ ID NO: 234 - DNA, 19 bp, synthetic construct
  misc_feature 1..19: note = Description of Artificial Sequence: Synthetic oligonucleotide
  source 1..19: mol_type = other DNA
gcagtgctttgcagtatga

SEQ ID NO: 235 - DNA, 19 bp, synthetic construct
  misc_feature 1..19: note = Description of Artificial Sequence: Synthetic oligonucleotide
  source 1..19: mol_type = other DNA
cagaaagccttgcgagttt

SEQ ID NO: 236 - DNA, 19 bp, synthetic construct
  misc_feature 1..19: note = Description of Artificial Sequence: Synthetic oligonucleotide
  source 1..19: mol_type = other DNA
gaatttggattgccacaga

SEQ ID NO: 237 - DNA, 19 bp, synthetic construct
  misc_feature 1..19: note = Description of Artificial Sequence: Synthetic oligonucleotide
  source 1..19: mol_type = other DNA
gaaggtgttcccactgata

SEQ ID NO: 238 - DNA, 19 bp, synthetic construct
  misc_feature 1..19: note = Description of Artificial Sequence: Synthetic oligonucleotide
  source 1..19: mol_type = other DNA
gagagggtcctgcaaagaa

SEQ ID NO: 239 - RNA, 19 nt, synthetic construct
  misc_feature 1..19: note = Description of Artificial Sequence: Synthetic oligonucleotide
  source 1..19: mol_type = other RNA
tgatgaaaatgagcaccag

SEQ ID NO: 240 - DNA, 21 bp, synthetic construct
  misc_feature 1..21: note = Description of Artificial Sequence: Synthetic oligonucleotide
  source 1..21: mol_type = other DNA
aaaatccctgccagaaccacc

SEQ ID NO: 241 - DNA, 21 bp, synthetic construct
  misc_feature 1..21: note = Description of Artificial Sequence: Synthetic oligonucleotide
  source 1..21: mol_type = other DNA
aacaagaccttcgactcttcc

SEQ ID NO: 242 - DNA, 19 bp, synthetic construct
  misc_feature 1..19: note = Description of Artificial Sequence: Synthetic oligonucleotide
  source 1..19: mol_type = other DNA
aaacgaaagcgagtacact

SEQ ID NO: 243 - DNA, 21 bp, synthetic construct
  misc_feature 1..21: note = Description of Artificial Sequence: Synthetic oligonucleotide
  source 1..21: mol_type = other DNA
agatggacttctctgtacagg

SEQ ID NO: 244 - DNA, 21 bp, synthetic construct
  misc_feature 1..21: note = Description of Artificial Sequence: Synthetic oligonucleotide
  source 1..21: mol_type = other DNA
gacattgtctgtctctgagga

SEQ ID NO: 245 - DNA, 21 bp, synthetic construct
  misc_feature 1..21: note = Description of Combined DNA/RNA Molecule: Synthetic oligonucleotide
  modified_base 5..6: mod_base = OTHER; note = uracil
  modified_base 8: mod_base = OTHER; note = uracil
  modified_base 11: mod_base = OTHER; note = uracil
  modified_base 15: mod_base = OTHER; note = uracil
  source 1..21: mol_type = other DNA
ggacttatcctggctagagtt

SEQ ID NO: 246 - DNA, 21 bp, synthetic construct
  misc_feature 1..21: note = Description of Combined DNA/RNA Molecule: Synthetic oligonucleotide
  modified_base 6: mod_base = OTHER; note = uracil
  modified_base 8: mod_base = OTHER; note = uracil
  modified_base 11: mod_base = OTHER; note = uracil
  modified_base 16: mod_base = OTHER; note = uracil
  source 1..21: mol_type = other DNA
ccggatctactcgactccctt

SEQ ID NO: 247 - DNA, 21 bp, synthetic construct
  misc_feature 1..21: note = Description of Combined DNA/RNA Molecule: Synthetic oligonucleotide
  modified_base 3: mod_base = OTHER; note = uracil
  modified_base 6: mod_base = OTHER; note = uracil
  modified_base 14: mod_base = OTHER; note = uracil
  modified_base 16: mod_base = OTHER; note = uracil
  modified_base 18: mod_base = OTHER; note = uracil
  source 1..21: mol_type = other DNA
cctaatcacacactctgtatt

SEQ ID NO: 248 - DNA, 21 bp, synthetic construct
  misc_feature 1..21: note = Description of Combined DNA/RNA Molecule: Synthetic oligonucleotide
  modified_base 3: mod_base = OTHER; note = uracil
  modified_base 18..19: mod_base = OTHER; note = uracil
  source 1..21: mol_type = other DNA
actgcagacaaaacacctttt

SEQ ID NO: 249 - DNA, 21 bp, synthetic construct
  misc_feature 1..21: note = Description of Combined DNA/RNA Molecule: Synthetic oligonucleotide
  modified_base 1: mod_base = OTHER; note = uracil
  modified_base 8: mod_base = OTHER; note = uracil
  modified_base 10: mod_base = OTHER; note = uracil
  modified_base 14: mod_base = OTHER; note = uracil
  modified_base 18..19: mod_base = OTHER; note = uracil
  source 1..21: mol_type = other DNA
tccaacctctgggtccgtttt

SEQ ID NO: 250 - DNA, 21 bp, synthetic construct
  misc_feature 1..21: note = Description of Combined DNA/RNA Molecule: Synthetic oligonucleotide
  modified_base 3: mod_base = OTHER; note = uracil
  modified_base 5: mod_base = OTHER; note = uracil
  modified_base 11..13: mod_base = OTHER; note = uracil
  modified_base 15: mod_base = OTHER; note = uracil
  modified_base 17: mod_base = OTHER; note = uracil
  modified_base 19: mod_base = OTHER; note = uracil
  source 1..21: mol_type = other DNA
actgtgaccgtttctgtgttt

SEQ ID NO: 251 - DNA, 21 bp, synthetic construct
  misc_feature 1..21: note = Description of Combined DNA/RNA Molecule: Synthetic oligonucleotide
  modified_base 2: mod_base = OTHER; note = uracil
  modified_base 8: mod_base = OTHER; note = uracil
  modified_base 10: mod_base = OTHER; note = uracil
  modified_base 16..17: mod_base = OTHER; note = uracil
  source 1..21: mol_type = other DNA
ctcagactctacagattgctt

SEQ ID NO: 252 - DNA, 19 bp, synthetic construct
  misc_feature 1..19: note = Description of Combined DNA/RNA Molecule: Synthetic oligonucleotide
  modified_base 11..12: mod_base = OTHER; note = uracil
  modified_base 18: mod_base = OTHER; note = uracil
  source 1..19: mol_type = other DNA
gggcaaggccttgcagctc

SEQ ID NO: 253 - DNA, 21 bp, synthetic construct
  misc_feature 1..21: note = Description of Combined DNA/RNA Molecule: Synthetic oligonucleotide
  modified_base 2: mod_base = OTHER; note = uracil
  modified_base 6: mod_base = OTHER; note = uracil
  modified_base 8: mod_base = OTHER; note = uracil
  modified_base 14: mod_base = OTHER; note = uracil
  modified_base 16..17: mod_base = OTHER; note = uracil
  source 1..21: mol_type = other DNA
atgactgtcaggatgttgctt

SEQ ID NO: 254 - RNA, 21 nt, synthetic construct
  misc_feature 1..21: note = Description of Artificial Sequence: Synthetic oligonucleotide
  source 1..21: mol_type = other RNA
gcaacatcctgacagtcatcc

SEQ ID NO: 255 - DNA, 21 bp, synthetic construct
  misc_feature 1..21: note = Description of Combined DNA/RNA Molecule: Synthetic oligonucleotide
  modified_base 1: mod_base = OTHER; note = uracil
  modified_base 8: mod_base = OTHER; note = uracil
  modified_base 11: mod_base = OTHER; note = uracil
  modified_base 13: mod_base = OTHER; note = uracil
  modified_base 16: mod_base = OTHER; note = uracil
  modified_base 18: mod_base = OTHER; note = uracil
  source 1..21: mol_type = other DNA
tgaacggtgctgtcatgtatt

SEQ ID NO: 256 - DNA, 21 bp, synthetic construct
  misc_feature 1..21: note = Description of Combined DNA/RNA Molecule: Synthetic oligonucleotide
  modified_base 8..9: mod_base = OTHER; note = uracil
  modified_base 15: mod_base = OTHER; note = uracil
  modified_base 19: mod_base = OTHER; note = uracil
  source 1..21: mol_type = other DNA
gcagaggttcggcatgaattt

SEQ ID NO: 257 - DNA, 21 bp, synthetic construct
  misc_feature 1..21: note = Description of Artificial Sequence: Synthetic oligonucleotide
  source 1..21: mol_type = other DNA
aagatgttcgtggacctgaac

SEQ ID NO: 258 - DNA, 38 bp, synthetic construct
  misc_feature 1..38: note = Description of Artificial Sequence: Synthetic oligonucleotide
  source 1..38: mol_type = other DNA
aagatgattgttcgtccctgctatagtgagtcgtatta

SEQ ID NO: 259 - RNA, 21 nt, synthetic construct
  misc_feature 1..21: note = Description of Artificial Sequence: Synthetic oligonucleotide
  source 1..21: mol_type = other RNA
gaacgaatcctgaagacatct

SEQ ID NO: 260 - RNA, 19 nt, synthetic construct
  misc_feature 1..19: note = Description of Artificial Sequence: Synthetic oligonucleotide
  source 1..19: mol_type = other RNA
gaaggaagctttgctagct

SEQ ID NO: 261 - DNA, 29 bp, synthetic construct
  misc_feature 1..29: note = Description of Artificial Sequence: Synthetic oligonucleotide
  source 1..29: mol_type = other DNA
aagcctggctacagcaatatgcctgtctc

SEQ ID NO: 262 - RNA, 19 nt, synthetic construct
  misc_feature 1..19: note = Description of Artificial Sequence: Synthetic oligonucleotide
  source 1..19: mol_type = other RNA
ggctcatttgcactcaatt

SEQ ID NO: 263 - RNA, 19 nt, synthetic construct
  misc_feature 1..19: note = Description of Artificial Sequence: Synthetic oligonucleotide
  source 1..19: mol_type = other RNA
gccacaaatctgatagtat

SEQ ID NO: 264 - RNA, 19 nt, synthetic construct
  misc_feature 1..19: note = Description of Artificial Sequence: Synthetic oligonucleotide
  source 1..19: mol_type = other RNA
ctggacttccagaagaaca

SEQ ID NO: 265 - DNA, 21 bp, synthetic construct
  misc_feature 1..21: note = Description of Combined DNA/RNA Molecule: Synthetic oligonucleotide
  modified_base 1: mod_base = OTHER; note = uracil
  modified_base 7: mod_base = OTHER; note = uracil
  modified_base 15..17: mod_base = OTHER; note = uracil
  modified_base 19: mod_base = OTHER; note = uracil
  source 1..21: mol_type = other DNA
tgaccatcaccgagtttattt

SEQ ID NO: 266 - DNA, 17 bp, synthetic construct
  misc_feature 1..17: note = Description of Artificial Sequence: Synthetic oligonucleotide
  source 1..17: mol_type = other DNA
gattataggaaatgttg

SEQ ID NO: 267 - DNA, 21 bp, synthetic construct
  misc_feature 1..21: note = Description of Artificial Sequence: Synthetic oligonucleotide
  source 1..21: mol_type = other DNA
aagaaggcagatgaggggtta

SEQ ID NO: 268 - DNA, 21 bp, synthetic construct
  misc_feature 1..21: note = Description of Artificial Sequence: Synthetic oligonucleotide
  source 1..21: mol_type = other DNA
aacaaagatggaccaacacag

SEQ ID NO: 269 - DNA, 21 bp, synthetic construct
  misc_feature 1..21: note = Description of Combined DNA/RNA Molecule: Synthetic oligonucleotide
  modified_base 9: mod_base = OTHER; note = uracil
  modified_base 11: mod_base = OTHER; note = uracil
  modified_base 15: mod_base = OTHER; note = uracil
  modified_base 19: mod_base = OTHER; note = uracil
  source 1..21: mol_type = other DNA
ggacgaggtctgcgtgaattt

SEQ ID NO: 270 - RNA, 21 nt, synthetic construct
  misc_feature 1..21: note = Description of Artificial Sequence: Synthetic oligonucleotide
  source 1..21: mol_type = other RNA
aagaaacgcggtaatcggact

SEQ ID NO: 271 - DNA, 47 bp, synthetic construct
  misc_feature 1..47: note = Description of Artificial Sequence: Synthetic oligonucleotide
  source 1..47: mol_type = other DNA
gcacaaagagcttgctcccttcaagagagggagcaagctctttgtgc

SEQ ID NO: 272 - DNA, 47 bp, synthetic construct
  misc_feature 1..47: note = Description of Artificial Sequence: Synthetic oligonucleotide
  source 1..47: mol_type = other DNA
gtccgggaagctgaaagtcttcaagagagactttcagcttcccggac

SEQ ID NO: 273 - DNA, 47 bp, synthetic construct
  misc_feature 1..47: note = Description of Artificial Sequence: Synthetic oligonucleotide
  source 1..47: mol_type = other DNA
gagatctggacagaatcgcttcaagagagcgattctgtccagatctc

SEQ ID NO: 274 - DNA, 19 bp, synthetic construct
  misc_feature 1..19: note = Description of Artificial Sequence: Synthetic oligonucleotide
  source 1..19: mol_type = other DNA
ggagaacagcattaaactg

SEQ ID NO: 275 - DNA, 19 bp, synthetic construct
  misc_feature 1..19: note = Description of Artificial Sequence: Synthetic oligonucleotide
  source 1..19: mol_type = other DNA
ggtcaacattctgatgtct

SEQ ID NO: 276 - DNA, 19 bp, synthetic construct
  misc_feature 1..19: note = Description of Artificial Sequence: Synthetic oligonucleotide
  source 1..19: mol_type = other DNA
gggcaaggccttgcagctc

SEQ ID NO: 277 - DNA, 21 bp, synthetic construct
  misc_feature 1..21: note = Description of Artificial Sequence: Synthetic oligonucleotide
  source 1..21: mol_type = other DNA
gtacaatgatgacatccgtaa

SEQ ID NO: 278 - DNA, 21 bp, synthetic construct
  misc_feature 1..21: note = Description of Artificial Sequence: Synthetic oligonucleotide
  source 1..21: mol_type = other DNA
gtacgtccgcgggttgctgca

SEQ ID NO: 279 - RNA, 21 nt, synthetic construct
  misc_feature 1..21: note = Description of Artificial Sequence: Synthetic oligonucleotide
  source 1..21: mol_type = other RNA
aagcatgtggcctgctatgga

SEQ ID NO: 280 - DNA, 65 bp, synthetic construct
  misc_feature 1..65: note = Description of Artificial Sequence: Synthetic oligonucleotide
  source 1..65: mol_type = other DNA
gatcccgcctcaacaacaacaacaacttcaagagagttgttgttgttgttgaggttttttggaaa

SEQ ID NO: 281 - RNA, 21 nt, synthetic construct
  misc_feature 1..21: note = Description of Artificial Sequence: Synthetic oligonucleotide
  source 1..21: mol_type = other RNA
aagaagagcttcgagactttc

SEQ ID NO: 282 - DNA, 21 bp, synthetic construct
  misc_feature 1..21: note = Description of Artificial Sequence: Synthetic oligonucleotide
  source 1..21: mol_type = other DNA
aactgggagagtacggtttcc

SEQ ID NO: 283 - DNA, 21 bp, synthetic construct
  misc_feature 1..21: note = Description of Artificial Sequence: Synthetic oligonucleotide
  source 1..21: mol_type = other DNA
aagtcggacgcaacagagaaa

SEQ ID NO: 284 - RNA, 21 nt, synthetic construct
  misc_feature 1..21: note = Description of Artificial Sequence: Synthetic oligonucleotide
  source 1..21: mol_type = other RNA
ggccaaccagatgcggctgtt

SEQ ID NO: 285 - RNA, 21 nt, synthetic construct
  misc_feature 1..21: note = Description of Artificial Sequence: Synthetic oligonucleotide
  source 1..21: mol_type = other RNA
gatgtttgacatcctcttctt

SEQ ID NO: 286 - RNA, 21 nt, synthetic construct
  misc_feature 1..21: note = Description of Artificial Sequence: Synthetic oligonucleotide
  source 1..21: mol_type = other RNA
ggctgcaagcagtatttactt

SEQ ID NO: 287 - RNA, 21 nt, synthetic construct
  misc_feature 1..21: note = Description of Artificial Sequence: Synthetic oligonucleotide
  source 1..21: mol_type = other RNA
ggacagagtcagattacagtt

SEQ ID NO: 288 - DNA, 23 bp, synthetic construct
  misc_feature 1..23: note = Description of Artificial Sequence: Synthetic oligonucleotide
  source 1..23: mol_type = other DNA
agccactgtggaagaagtatatt

SEQ ID NO: 289 - DNA, 21 bp, synthetic construct
  misc_feature 1..21: note = Description of Combined DNA/RNA Molecule: Synthetic oligonucleotide
  modified_base 4: mod_base = OTHER; note = uracil
  modified_base 6: mod_base = OTHER; note = uracil
  modified_base 9..10: mod_base = OTHER; note = uracil
  modified_base 13: mod_base = OTHER; note = uracil
  modified_base 16..17: mod_base = OTHER; note = uracil
  source 1..21: mol_type = other DNA
ccctctggttggtgattcatt

SEQ ID NO: 290 - DNA, 21 bp, synthetic construct
  misc_feature 1..21: note = Description of Combined DNA/RNA Molecule: Synthetic oligonucleotide
  modified_base 4: mod_base = OTHER; note = uracil
  modified_base 7: mod_base = OTHER; note = uracil
  modified_base 14..15: mod_base = OTHER; note = uracil
  modified_base 18: mod_base = OTHER; note = uracil
  source 1..21: mol_type = other DNA
ggatgatggcaccttcctatt

SEQ ID NO: 291 - DNA, 21 bp, synthetic construct
  misc_feature 1..21: note = Description of Artificial Sequence: Synthetic oligonucleotide
  source 1..21: mol_type = other DNA
aattggagatgaagatgtagg

SEQ ID NO: 292 - DNA, 21 bp, synthetic construct
  misc_feature 1..21: note = Description of Combined DNA/RNA Molecule: Synthetic oligonucleotide
  modified_base 4..5: mod_base = OTHER; note = uracil
  modified_base 13..14: mod_base = OTHER; note = uracil
  source 1..21: mol_type = other DNA
cagttccgccacttgccaatt

SEQ ID NO: 293 - DNA, 21 bp, synthetic construct
  misc_feature 1..21: note = Description of Combined DNA/RNA Molecule: Synthetic oligonucleotide
  modified_base 5: mod_base = OTHER; note = uracil
  modified_base 8: mod_base = OTHER; note = uracil
  modified_base 14..16: mod_base = OTHER; note = uracil
  modified_base 18..19: mod_base = OTHER; note = uracil
  source 1..21: mol_type = other DNA
agcctggtggacatttatttt

SEQ ID NO: 294 - DNA, 21 bp, synthetic construct
  misc_feature 1..21: note = Description of Combined DNA/RNA Molecule: Synthetic oligonucleotide
  modified_base 3: mod_base = OTHER; note = uracil
  modified_base 5: mod_base = OTHER; note = uracil
  modified_base 7: mod_base = OTHER; note = uracil
  modified_base 13: mod_base = OTHER; note = uracil
  modified_base 15: mod_base = OTHER; note = uracil
  source 1..21: mol_type = other DNA
gatgtgtgaaactctgaactt

SEQ ID NO: 295 - DNA, 21 bp, synthetic construct
  misc_feature 1..21: note = Description of Combined DNA/RNA Molecule: Synthetic oligonucleotide
  modified_base 5: mod_base = OTHER; note = uracil
  modified_base 9: mod_base = OTHER; note = uracil
  modified_base 15: mod_base = OTHER; note = uracil
  source 1..21: mol_type = other DNA
cagatgggtaaggatggcatt

SEQ ID NO: 296 - RNA, 21 nt, synthetic construct
  misc_feature 1..21: note = Description of Artificial Sequence: Synthetic oligonucleotide
  source 1..21: mol_type = other RNA
aagcactatcattgcgaatcc

SEQ ID NO: 297 - DNA, 21 bp, synthetic construct
  misc_feature 1..21: note = Description of Artificial Sequence: Synthetic oligonucleotide
  source 1..21: mol_type = other DNA
aactgggcgagtattacatga

SEQ ID NO: 298 - DNA, 19 bp, synthetic construct
  misc_feature 1..19: note = Description of Artificial Sequence: Synthetic oligonucleotide
  source 1..19: mol_type = other DNA
tgaacaaagtgagagacat

SEQ ID NO: 299 - DNA, 21 bp, synthetic construct
  misc_feature 1..21: note = Description of Artificial Sequence: Synthetic oligonucleotide
  source 1..21: mol_type = other DNA
aatgtgtgaatgacaactact

SEQ ID NO: 300 - DNA, 21 bp, synthetic construct
  misc_feature 1..21: note = Description of Artificial Sequence: Synthetic oligonucleotide
  source 1..21: mol_type = other DNA
aatacggactcaccttgcttg

SEQ ID NO: 301 - DNA, 22 bp, synthetic construct
  misc_feature 1..22: note = Description of Combined DNA/RNA Molecule: Synthetic oligonucleotide
  modified_base 8..9: mod_base = OTHER; note = uracil
  modified_base 13..17: mod_base = OTHER; note = uracil
  modified_base 20: mod_base = OTHER; note = uracil
  source 1..22: mol_type = other DNA
ccgccgcttccatttttccttt

SEQ ID NO: 302 - DNA, 23 bp, synthetic construct
  misc_feature 1..23: note = Description of Combined DNA/RNA Molecule: Synthetic oligonucleotide
  modified_base 9: mod_base = OTHER; note = uracil
  source 1..23: mol_type = other DNA
aggaaaaatggaagcggcgggtt

SEQ ID NO: 303 - DNA, 21 bp, synthetic construct
  misc_feature 1..21: note = Description of Combined DNA/RNA Molecule: Synthetic oligonucleotide
  modified_base 3: mod_base = OTHER; note = uracil
  modified_base 9: mod_base = OTHER; note = uracil
  modified_base 14: mod_base = OTHER; note = uracil
  modified_base 18: mod_base = OTHER; note = uracil
  source 1..21: mol_type = other DNA
cctggaactcacctacctgtt

SEQ ID NO: 304 - DNA, 21 bp, synthetic construct
  misc_feature 1..21: note = Description of Combined DNA/RNA Molecule: Synthetic oligonucleotide
  modified_base 2: mod_base = OTHER; note = uracil
  modified_base 6..8: mod_base = OTHER; note = uracil
  modified_base 10: mod_base = OTHER; note = uracil
  modified_base 18: mod_base = OTHER; note = uracil
  source 1..21: mol_type = other DNA
ctacctttctacggacgtgtt

SEQ ID NO: 305 - DNA, 21 bp, synthetic construct
  misc_feature 1..21: note = Description of Combined DNA/RNA Molecule: Synthetic oligonucleotide
  modified_base 3: mod_base = OTHER; note = uracil
  modified_base 11: mod_base = OTHER; note = uracil
  modified_base 18: mod_base = OTHER; note = uracil
  source 1..21: mol_type = other DNA
gatccggaagtacacgatgtt

SEQ ID NO: 306 - RNA, 19 nt, synthetic construct
  misc_feature 1..19: note = Description of Artificial Sequence: Synthetic oligonucleotide
  source 1..19: mol_type = other RNA
gaaggaatcctccaagtca

SEQ ID NO: 307 - DNA, 21 bp, synthetic construct
  misc_feature 1..21: note = Description of Artificial Sequence: Synthetic oligonucleotide
  source 1..21: mol_type = other DNA
aagctccatgtcacagtacga

SEQ ID NO: 308 - DNA, 21 bp, synthetic construct
  misc_feature 1..21: note = Description of Artificial Sequence: Synthetic oligonucleotide
  source 1..21: mol_type = other DNA
aagcgctgcgtcatgaatgtt

SEQ ID NO: 309 - DNA, 21 bp, synthetic construct
  misc_feature 1..21: note = Description of Artificial Sequence: Synthetic oligonucleotide
  source 1..21: mol_type = other DNA
ctgcctaaggcggatttgaat

SEQ ID NO: 310 - DNA, 21 bp, synthetic construct
  misc_feature 1..21: note = Description of Artificial Sequence: Synthetic oligonucleotide
  source 1..21: mol_type = other DNA
ggcaggcgacgagtttgaact

SEQ ID NO: 311 - DNA, 21 bp, synthetic construct
  misc_feature 1..21: note = Description of Artificial Sequence: Synthetic oligonucleotide
  source 1..21: mol_type = other DNA
gtgcgtggaaagcgtagacaa

SEQ ID NO: 312 - DNA, 21 bp, synthetic construct
  misc_feature 1..21: note = Description of Artificial Sequence: Synthetic oligonucleotide
  source 1..21: mol_type = other DNA
ggcggagttcacagctctata

SEQ ID NO: 313 - DNA, 21 bp, synthetic construct
  misc_feature 1..21: note = Description of Artificial Sequence: Synthetic oligonucleotide
  source 1..21: mol_type = other DNA
gtgggcataagtgctgatcta

SEQ ID NO: 314 - DNA, 21 bp, synthetic construct
  misc_feature 1..21: note = Description of Artificial Sequence: Synthetic oligonucleotide
  source 1..21: mol_type = other DNA
ctcggtcctgcgattattaat

SEQ ID NO: 315 - DNA, 53 bp, synthetic construct
  misc_feature 1..53: note = Description of Artificial Sequence: Synthetic oligonucleotide
  source 1..53: mol_type = other DNA
aaggccgagatcagcaaagttcaagagactttgctgatctcggcctttttttt

SEQ ID NO: 316 - DNA, 21 bp, synthetic construct
  misc_feature 1..21: note = Description of Combined DNA/RNA Molecule: Synthetic oligonucleotide
  modified_base 10: mod_base = OTHER; note = uracil
  modified_base 16: mod_base = OTHER; note = uracil
  source 1..21: mol_type = other DNA
ggccagccatcacaatcaatt

SEQ ID NO: 317 - DNA, 21 bp, synthetic construct
  misc_feature 1..21: note = Description of Combined DNA/RNA Molecule: Synthetic oligonucleotide
  modified_base 6..7: mod_base = OTHER; note = uracil
  modified_base 9: mod_base = OTHER; note = uracil
  modified_base 13: mod_base = OTHER; note = uracil
  source 1..21: mol_type = other DNA
ggaacttctaaatgaaccatt

SEQ ID NO: 318 - DNA, 21 bp, synthetic construct
  misc_feature 1..21: note = Description of Combined DNA/RNA Molecule: Synthetic oligonucleotide
  modified_base 3: mod_base = OTHER; note = uracil
  modified_base 8..9: mod_base = OTHER; note = uracil
  modified_base 14..17: mod_base = OTHER; note = uracil
  modified_base 19: mod_base = OTHER; note = uracil
  source 1..21: mol_type = other DNA
ggtccagttaaggttttgttt

SEQ ID NO: 319 - DNA, 21 bp, synthetic construct
  misc_feature 1..21: note = Description of Combined DNA/RNA Molecule: Synthetic oligonucleotide
  modified_base 3..4: mod_base = OTHER; note = uracil
  modified_base 8..9: mod_base = OTHER; note = uracil
  modified_base 15: mod_base = OTHER; note = uracil
  source 1..21: mol_type = other DNA
ggttaccttccacctacaatt

SEQ ID NO: 320 - RNA, 21 nt, synthetic construct
  misc_feature 1..21: note = Description of Artificial Sequence: Synthetic oligonucleotide
  source 1..21: mol_type = other RNA
aagtggatgcctttcgggtca

SEQ ID NO: 321 - RNA, 21 nt, synthetic construct
  misc_feature 1..21: note = Description of Artificial Sequence: Synthetic oligonucleotide
  source 1..21: mol_type = other RNA
aaggagaacagttcttgcggc

SEQ ID NO: 322 - RNA, 21 nt, synthetic construct
  misc_feature 1..21: note = Description of Artificial Sequence: Synthetic oligonucleotide
  source 1..21: mol_type = other RNA
aaggtccagtcattccaaatg

SEQ ID NO: 323 - DNA, 22 bp, synthetic construct
  misc_feature 1..22: note = Description of Combined DNA/RNA Molecule: Synthetic oligonucleotide
  modified_base 11: mod_base = OTHER; note = uracil
  modified_base 13..14: mod_base = OTHER; note = uracil
  modified_base 19..20: mod_base = OTHER; note = uracil
  source 1..22: mol_type = other DNA
aggaaggacctgttgacctttt

SEQ ID NO: 324 - DNA, 21 bp, synthetic construct
  misc_feature 1..21: note = Description of Combined DNA/RNA Molecule: Synthetic oligonucleotide
  modified_base 1: mod_base = OTHER; note = uracil
  modified_base 4: mod_base = OTHER; note = uracil
  modified_base 9..10: mod_base = OTHER; note = uracil
  modified_base 13: mod_base = OTHER; note = uracil
  modified_base 17: mod_base = OTHER; note = uracil
  source 1..21: mol_type = other DNA
tggtgagcttaatgaatgatt

SEQ ID NO: 325 - DNA, 21 bp, synthetic construct
  misc_feature 1..21: note = Description of Combined DNA/RNA Molecule: Synthetic oligonucleotide
  modified_base 9..10: mod_base = OTHER; note = uracil
  modified_base 15: mod_base = OTHER; note = uracil
  modified_base 17: mod_base = OTHER; note = uracil
  modified_base 19: mod_base = OTHER; note = uracil
  source 1..21: mol_type = other DNA
agaggacattgaggtgtattt

SEQ ID NO: 326 - DNA, 23 bp, synthetic construct
  misc_feature 1..23: note = Description of Combined DNA/RNA Molecule: Synthetic oligonucleotide
  source 1..23: mol_type = other DNA
aactgctcaacaccggaattttt

SEQ ID NO: 327 - RNA, 22 nt, synthetic construct
  misc_feature 1..22: note = Description of Artificial Sequence: Synthetic oligonucleotide
  source 1..22: mol_type = other RNA
ccatcctgtacaacttcatgtg

SEQ ID NO: 328 - DNA, 21 bp, synthetic construct
  misc_feature 1..21: note = Description of Combined DNA/RNA Molecule: Synthetic oligonucleotide
  modified_base 4: mod_base = OTHER; note = uracil
  modified_base 18..19: mod_base = OTHER; note = uracil
  source 1..21: mol_type = other DNA
caataaggaagaagccctttt

SEQ ID NO: 329 - DNA, 21 bp, synthetic construct
  misc_feature 1..21: note = Description of Combined DNA/RNA Molecule: Synthetic oligonucleotide
  modified_base 4..5: mod_base = OTHER; note = uracil
  modified_base 8..9: mod_base = OTHER; note = uracil
  modified_base 11..12: mod_base = OTHER; note = uracil
  modified_base 20: mod_base = OTHER; note = uracil
  source 1..21: mol_type = other DNA
ttattccttcttcgggaagtc

SEQ ID NO: 330 - DNA, 21 bp, synthetic construct
  misc_feature 1..21: note = Description of Combined DNA/RNA Molecule: Synthetic oligonucleotide
  modified_base 4: mod_base = OTHER; note = uracil
  modified_base 8..9: mod_base = OTHER; note = uracil
  modified_base 12: mod_base = OTHER; note = uracil
  modified_base 17: mod_base = OTHER; note = uracil
  source 1..21: mol_type = other DNA
ggctggcttcatccactgctt

SEQ ID NO: 331 - DNA, 19 bp, synthetic construct
  misc_feature 1..19: note = Description of Artificial Sequence: Synthetic oligonucleotide
  source 1..19: mol_type = other DNA
cgaagatgttgacctggtc

SEQ ID NO: 332 - DNA, 19 bp, synthetic construct
  misc_feature 1..19: note = Description of Artificial Sequence: Synthetic oligonucleotide
  source 1..19: mol_type = other DNA
agagttgtcctgtagttcg

SEQ ID NO: 333 - DNA, 21 bp, synthetic construct
  misc_feature 1..21: note = Description of Combined DNA/RNA Molecule: Synthetic oligonucleotide
  modified_base 6: mod_base = OTHER; note = uracil
  modified_base 8: mod_base = OTHER; note = uracil
  modified_base 17: mod_base = OTHER; note = uracil
  source 1..21: mol_type = other DNA
ggaaatatgggaaagatcctt

SEQ ID NO: 334 - DNA, 23 bp, synthetic construct
  misc_feature 1..23: note = Description of Combined DNA/RNA Molecule: Synthetic oligonucleotide
  modified_base 7..9: mod_base = OTHER; note = uracil
  modified_base 14: mod_base = OTHER; note = uracil
  modified_base 18: mod_base = OTHER; note = uracil
  source 1..23: mol_type = other DNA
ggagactttcaaatacatctttt

SEQ ID NO: 335 - DNA, 21 bp, synthetic construct
  misc_feature 1..21: note = Description of Artificial Sequence: Synthetic oligonucleotide
  source 1..21: mol_type = other DNA
aaccttctggaacccgcccac

SEQ ID NO: 336 - DNA, 21 bp, synthetic construct
  misc_feature 1..21: note = Description of Artificial Sequence: Synthetic oligonucleotide
  source 1..21: mol_type = other DNA
aatgttgcagaggggaaggag

SEQ ID NO: 337 - DNA, 21 bp, synthetic construct
  misc_feature 1..21: note = Description of Artificial Sequence: Synthetic oligonucleotide
  source 1..21: mol_type = other DNA
aagagaatggagcacatgaaa

SEQ ID NO: 338 - DNA, 21 bp, synthetic construct
  misc_feature 1..21: note = Description of Artificial Sequence: Synthetic oligonucleotide
  source 1..21: mol_type = other DNA
aagatgagcataaccagtgac

SEQ ID NO: 339 - DNA, 21 bp, synthetic construct
  misc_feature 1..21: note = Description of Artificial Sequence: Synthetic oligonucleotide
  source 1..21: mol_type = other DNA
aaggccctatatttgcattaa

SEQ ID NO: 340 - DNA, 23 bp, synthetic construct
  misc_feature 1..23: note = Description of Artificial Sequence: Synthetic oligonucleotide
  source 1..23: mol_type = other DNA
gttggctgagtgctatgggctga

SEQ ID NO: 341 - DNA, 22 bp, synthetic construct
  misc_feature 1..22: note = Description of Artificial Sequence: Synthetic oligonucleotide
  source 1..22: mol_type = other DNA
gggcttatggaggaccctatga

SEQ ID NO: 342 - DNA, 52 bp, synthetic construct
  misc_feature 1..52: note = Description of Artificial Sequence: Synthetic oligonucleotide
  source 1..52: mol_type = other DNA
ggaacagcagagaagctcattcaagagatgagcttctctgctgttccttttt

SEQ ID NO: 343 - DNA, 51 bp, synthetic construct
  misc_feature 1..51: note = Description of Artificial Sequence: Synthetic oligonucleotide
  source 1..51: mol_type = other DNA
caccgaagcagcacgacttcttcttcaagagagaagaagtcgtgctgcttc

SEQ ID NO: 344 - DNA, 22 bp, synthetic construct
  misc_feature 1..22: note = Description of Combined DNA/RNA Molecule: Synthetic oligonucleotide
  modified_base 4..5: mod_base = OTHER; note = uracil
  modified_base 13: mod_base = OTHER; note = uracil
  source 1..22: mol_type = other DNA
aggttcagcagctccacggatt

SEQ ID NO: 345 - DNA, 64 bp, synthetic construct
  misc_feature 1..64: note = Description of Artificial Sequence: Synthetic oligonucleotide
  source 1..64: mol_type = other DNA
gatcccccctcggggatactgtctgattcaagagatcagacagtatccccgaggtttttggaaa

SEQ ID NO: 346 - DNA, 19 bp, synthetic construct
  misc_feature 1..19: note = Description of Artificial Sequence: Synthetic oligonucleotide
  source 1..19: mol_type = other DNA
gagcatcttcgagcaagaa

SEQ ID NO: 347 - DNA, 19 bp, synthetic construct
  misc_feature 1..19: note = Description of Artificial Sequence: Synthetic oligonucleotide
  source 1..19: mol_type = other DNA
catgtggcaccgtttgcct

SEQ ID NO: 348 - RNA, 19 nt, synthetic construct
  misc_feature 1..19: note = Description of Artificial Sequence: Synthetic oligonucleotide
  source 1..19: mol_type = other RNA
tggcttatcttacactgga

SEQ ID NO: 349 - RNA, 25 nt, synthetic construct
  misc_feature 1..25: note = Description of Artificial Sequence: Synthetic oligonucleotide
  source 1..25: mol_type = other RNA
ggctcaagttcaggagtgagaacaa

SEQ ID NO: 350 - RNA, 25 nt, synthetic construct
  misc_feature 1..25: note = Description of Artificial Sequence: Synthetic oligonucleotide
  source 1..25: mol_type = other RNA
ggaacgacttcaaagagaacttgag

SEQ ID NO: 351 - RNA, 25 nt, synthetic construct
  misc_feature 1..25: note = Description of Artificial Sequence: Synthetic oligonucleotide
  source 1..25: mol_type = other RNA
gcattacaaccagacagttgatatt

SEQ ID NO: 352 - DNA, 21 bp, synthetic construct
  misc_feature 1..21: note = Description of Combined DNA/RNA Molecule: Synthetic oligonucleotide
  modified_base 2: mod_base = OTHER; note = uracil
  modified_base 18: mod_base = OTHER; note = uracil
  source 1..21: mol_type = other DNA
gtggagcagcggcaaaatctt

SEQ ID NO: 353 - DNA, 21 bp, synthetic construct
  misc_feature 1..21: note = Description of Combined DNA/RNA Molecule: Synthetic oligonucleotide
  modified_base 1: mod_base = OTHER; note = uracil
  modified_base 4: mod_base = OTHER; note = uracil
  modified_base 7..9: mod_base = OTHER; note = uracil
  modified_base 16: mod_base = OTHER; note = uracil
  source 1..21: mol_type = other DNA
tcctcatttgaggaataaatt

SEQ ID NO: 354 - DNA, 21 bp, synthetic construct
  misc_feature 1..21: note = Description of Combined DNA/RNA Molecule: Synthetic oligonucleotide
  modified_base 5: mod_base = OTHER; note = uracil
  modified_base 11..12: mod_base = OTHER; note = uracil
  modified_base 14: mod_base = OTHER; note = uracil
  modified_base 19: mod_base = OTHER; note = uracil
  source 1..21: mol_type = other DNA
ggaataaaccttgtgcagttt

SEQ ID NO: 355 - DNA, 21 bp, synthetic construct
  misc_feature 1..21: note = Description of Combined DNA/RNA Molecule: Synthetic oligonucleotide
  modified_base 1: mod_base = OTHER; note = uracil
  modified_base 7..8: mod_base = OTHER; note = uracil
  modified_base 10: mod_base = OTHER; note = uracil
  modified_base 15..16: mod_base = OTHER; note = uracil
  modified_base 18: mod_base = OTHER; note = uracil
  source 1..21: mol_type = other DNA
taaaccttgtgcagttgtatt

SEQ ID NO: 356 - DNA, 21 bp, synthetic construct
  misc_feature 1..21: note = Description of Combined DNA/RNA Molecule: Synthetic oligonucleotide
  modified_base 3..4: mod_base = OTHER; note = uracil
  modified_base 6: mod_base = OTHER; note = uracil
  modified_base 11..12: mod_base = OTHER; note = uracil
  modified_base 14: mod_base = OTHER; note = uracil
  modified_base 19: mod_base = OTHER; note = uracil
  source 1..21: mol_type = other DNA
ccttgtgcagttgtacagttt

SEQ ID NO: 357 - RNA, 21 nt, synthetic construct
  misc_feature 1..21: note = Description of Artificial Sequence: Synthetic oligonucleotide
  source 1..21: mol_type = other RNA
ccggcaacctcgcggccaatt

SEQ ID NO: 358 - RNA, 21 nt, synthetic construct
  misc_feature 1..21: note = Description of Artificial Sequence: Synthetic oligonucleotide
  source 1..21: mol_type = other RNA
cgactaccatctgcacttatt

SEQ ID NO: 359 - DNA, 21 bp, synthetic construct
  misc_feature 1..21: note = Description of Artificial Sequence: Synthetic oligonucleotide
  source 1..21: mol_type = other DNA
aaccggctctccattggcatt

SEQ ID NO: 360 - DNA, 21 bp, synthetic construct
  misc_feature 1..21: note = Description of Artificial Sequence: Synthetic oligonucleotide
  source 1..21: mol_type = other DNA
gtggttggaaatggcaccttt

SEQ ID NO: 361 - RNA, 21 nt, synthetic construct
  misc_feature 1..21: note = Description of Artificial Sequence: Synthetic oligonucleotide
  source 1..21: mol_type = other RNA
aagcgaccaggattatattct

SEQ ID NO: 362 - RNA, 21 nt, synthetic construct
  misc_feature 1..21: note = Description of Artificial Sequence: Synthetic oligonucleotide
  source 1..21: mol_type = other RNA
aagtgaggtggaaaggcgttt

SEQ ID NO: 363 - DNA, 55 bp, synthetic construct
  misc_feature 1..55: note = Description of Artificial Sequence: Synthetic oligonucleotide
  source 1..55: mol_type = other DNA
tcccatgtccacttcgactatgatgtcaagagcatcatagtcgaagtggacattt

SEQ ID NO: 364 - DNA, 51 bp, synthetic construct
  misc_feature 1..51: note = Description of Artificial Sequence: Synthetic oligonucleotide
  source 1..51: mol_type = other DNA
tcccagatctacttcttccgaggtcaagagcctcggaagaagtagatcttt

SEQ ID NO: 365 - DNA, 55 bp, synthetic construct
  misc_feature 1..55: note = Description of Artificial Sequence: Synthetic oligonucleotide
  source 1..55: mol_type = other DNA
tcccaggatgctgatggctatgccttcaagagaggcatagccatcagcatccttt

SEQ ID NO: 366 - DNA, 21 bp, synthetic construct
  misc_feature 1..21: note = Description of Combined DNA/RNA Molecule: Synthetic oligonucleotide
  source 1..21: mol_type = other DNA
aatgcccatctctataggttt

SEQ ID NO: 367 - DNA, 21 bp, synthetic construct
  misc_feature 1..21: note = Description of Combined DNA/RNA Molecule: Synthetic oligonucleotide
  modified_base 4: mod_base = OTHER; note = uracil
  modified_base 6: mod_base = OTHER; note = uracil
  modified_base 18: mod_base = OTHER; note = uracil
  source 1..21: mol_type = other DNA
ggatatgcgaagaaagatctt

SEQ ID NO: 368 - DNA, 21 bp, synthetic construct
  misc_feature 1..21: note = Description of Artificial Sequence: Synthetic oligonucleotide
  source 1..21: mol_type = other DNA
aaggaggaagctgatgagaac

SEQ ID NO: 369 - DNA, 21 bp, synthetic construct
  misc_feature 1..21: note = Description of Artificial Sequence: Synthetic oligonucleotide
  source 1..21: mol_type = other DNA
aacgtccggaacaaactgaag

SEQ ID NO: 370 - DNA, 21 bp, synthetic construct
  misc_feature 1..21: note = Description of Artificial Sequence: Synthetic oligonucleotide
  source 1..21: mol_type = other DNA
aagtggtacgcagattgcacg

SEQ ID NO: 371 - DNA, 21 bp, synthetic construct
  misc_feature 1..21: note = Description of Artificial Sequence: Synthetic oligonucleotide
  source 1..21: mol_type = other DNA
aaggagaagaaaaagaaggac

SEQ ID NO: 372 - DNA, 19 bp, synthetic construct
  misc_feature 1..19: note = Description of Artificial Sequence: Synthetic oligonucleotide
  source 1..19: mol_type = other DNA
gcaggtagagttggctttg

SEQ ID NO: 373 - DNA, 19 bp, synthetic construct
  misc_feature 1..19: note = Description of Artificial Sequence: Synthetic oligonucleotide
  source 1..19: mol_type = other DNA
gactatgatcgactgcggc

SEQ ID NO: 374 - DNA, 19 bp, synthetic construct
  misc_feature 1..19: note = Description of Artificial Sequence: Synthetic oligonucleotide
  source 1..19: mol_type = other DNA
gtgagaacgatgagaaata

SEQ ID NO: 375 - DNA, 19 bp, synthetic construct
  misc_feature 1..19: note = Description of Artificial Sequence: Synthetic oligonucleotide
  source 1..19: mol_type = other DNA
gttggtgcctaatcactta

SEQ ID NO: 376 - DNA, 19 bp, synthetic construct
  misc_feature 1..19: note = Description of Artificial Sequence: Synthetic oligonucleotide
  source 1..19: mol_type = other DNA
gacgtgtcaggaccttcgt

SEQ ID NO: 377 - DNA, 19 bp, synthetic construct
  misc_feature 1..19: note = Description of Artificial Sequence: Synthetic oligonucleotide
  source 1..19: mol_type = other DNA
cttaactggtgtacattaa

SEQ ID NO: 378 - RNA, 23 nt, synthetic construct
  misc_feature 1..23: note = Description of Artificial Sequence: Synthetic oligonucleotide
  source 1..23: mol_type = other RNA
caatatgatcatccagtccatta

SEQ ID NO: 379 - RNA, 23 nt, synthetic construct
  misc_feature 1..23: note = Description of Artificial Sequence: Synthetic oligonucleotide
  source 1..23: mol_type = other RNA
caagcatgcagcttctaccgttc

SEQ ID NO: 380 - RNA, 23 nt, synthetic construct
  misc_feature 1..23: note = Description of Artificial Sequence: Synthetic oligonucleotide
  source 1..23: mol_type = other RNA
cagtcgagttctcccaccgctct

SEQ ID NO: 381 - RNA, 23 nt, synthetic construct
  misc_feature 1..23: note = Description of Artificial Sequence: Synthetic oligonucleotide
  source 1..23: mol_type = other RNA
gagaccatctacgacctgggcac

SEQ ID NO: 382 - RNA, 23 nt, synthetic construct
  misc_feature 1..23: note = Description of Artificial Sequence: Synthetic oligonucleotide
  source 1..23: mol_type = other RNA
gagagtgacatggcgcctgtcct

SEQ ID NO: 383 - RNA, 23 nt, synthetic construct
  misc_feature 1..23: note = Description of Artificial Sequence: Synthetic oligonucleotide
  source 1..23: mol_type = other RNA
aaggaaccaaacagttgaaactg

SEQ ID NO: 384 - RNA, 23 nt, synthetic construct
  misc_feature 1..23: note = Description of Artificial Sequence: Synthetic oligonucleotide
  source 1..23: mol_type = other RNA
gagtcttctatcgctcccatcgt

SEQ ID NO: 385 - RNA, 23 nt, synthetic construct
  misc_feature 1..23: note = Description of Artificial Sequence: Synthetic oligonucleotide
  source 1..23: mol_type = other RNA
aaattgaggtggattcacgagtt

SEQ ID NO: 386 - RNA, 23 nt, synthetic construct
  misc_feature 1..23: note = Description of Artificial Sequence: Synthetic oligonucleotide
  source 1..23: mol_type = other RNA
tagtatcagcgaggaacaaatta

SEQ ID NO: 387 - RNA, 23 nt, synthetic construct
  misc_feature 1..23: note = Description of Artificial Sequence: Synthetic oligonucleotide
  source 1..23: mol_type = other RNA
aagagtatatagcacaggattta

SEQ ID NO: 388 - RNA, 23 nt, synthetic construct
  misc_feature 1..23: note = Description of Artificial Sequence: Synthetic oligonucleotide
  source 1..23: mol_type = other RNA
aagattgcccttgctcgcaataa

SEQ ID NO: 389 - RNA, 23 nt, synthetic construct
  misc_feature 1..23: note = Description of Artificial Sequence: Synthetic oligonucleotide
  source 1..23: mol_type = other RNA
tatcaccgtatgaaatggaaact

SEQ ID NO: 390 - RNA, 23 nt, synthetic construct
  misc_feature 1..23: note = Description of Artificial Sequence: Synthetic oligonucleotide
  source 1..23: mol_type = other RNA
aagtggaatgggtaactcttctt

SEQ ID NO: 391 - RNA, 23 nt, synthetic construct
  misc_feature 1..23: note = Description of Artificial Sequence: Synthetic oligonucleotide
  source 1..23: mol_type = other RNA
aacggccgtcccaaagctggctg

SEQ ID NO: 392 - RNA, 23 nt, synthetic construct
  misc_feature 1..23: note = Description of Artificial Sequence: Synthetic oligonucleotide
  source 1..23: mol_type = other RNA
aagaaacagattctgcgcttgat

SEQ ID NO: 393 - RNA, 23 nt, synthetic construct
  misc_feature 1..23: note = Description of Artificial Sequence: Synthetic oligonucleotide
  source 1..23: mol_type = other RNA
gaattaggtccacttcaatgtcc

SEQ ID NO: 394 - RNA, 23 nt, synthetic construct
  misc_feature 1..23: note = Description of Artificial Sequence: Synthetic oligonucleotide
  source 1..23: mol_type = other RNA
aagattcttccattaaattgcct

SEQ ID NO: 395 - DNA, 21 bp, synthetic construct
  misc_feature 1..21: note = Description of Artificial Sequence: Synthetic oligonucleotide
  source 1..21: mol_type = other DNA
aactaccagaaaggtatacct

SEQ ID NO: 396 - DNA, 21 bp, synthetic construct
  misc_feature 1..21: note = Description of Artificial Sequence: Synthetic oligonucleotide
  source 1..21: mol_type = other DNA
aagacccttgtgctcgttgtc

SEQ ID NO: 397 - DNA, 21 bp, synthetic construct
  misc_feature 1..21: note = Description of Artificial Sequence: Synthetic oligonucleotide
  source 1..21: mol_type = other DNA
aagcagagtgacctggtagat

SEQ ID NO: 398 - DNA, 21 bp, synthetic construct
  misc_feature 1..21: note = Description of Combined DNA/RNA Molecule: Synthetic oligonucleotide
  modified_base 1: mod_base = OTHER; note = uracil
  modified_base 7: mod_base = OTHER; note = uracil
  modified_base 9: mod_base = OTHER; note = uracil
  modified_base 12..14: mod_base = OTHER; note = uracil
  modified_base 16: mod_base = OTHER; note = uracil
  modified_base 18: mod_base = OTHER; note = uracil
  source 1..21: mol_type = other DNA
tcacagtgtcctttatgtatt

SEQ ID NO: 399 - DNA, 21 bp, synthetic construct
  misc_feature 1..21: note = Description of Combined DNA/RNA Molecule: Synthetic oligonucleotide
  modified_base 2: mod_base = OTHER; note = uracil
  modified_base 6..7: mod_base = OTHER; note = uracil
  modified_base 15..16: mod_base = OTHER; note = uracil
  source 1..21: mol_type = other DNA
atggcttcgacgagttcaatt

SEQ ID NO: 400 - DNA, 21 bp, synthetic construct
  misc_feature 1..21: note = Description of Combined DNA/RNA Molecule: Synthetic oligonucleotide
  modified_base 4: mod_base = OTHER; note = uracil
  modified_base 19: mod_base = OTHER; note = uracil
  source 1..21: mol_type = other DNA
gcatgaaccggaggcccattt

SEQ ID NO: 401 - DNA, 21 bp, synthetic construct
  misc_feature 1..21: note = Description of Artificial Sequence: Synthetic oligonucleotide
  source 1..21: mol_type = other DNA
agaccagagcaggaacaagtt

SEQ ID NO: 402 - DNA, 19 bp, synthetic construct
  misc_feature 1..19: note = Description of Artificial Sequence: Synthetic oligonucleotide
  source 1..19: mol_type = other DNA
gaagatttgcgcagtggac

SEQ ID NO: 403 - RNA, 21 nt, synthetic construct
  misc_feature 1..21: note = Description of Artificial Sequence: Synthetic oligonucleotide
  source 1..21: mol_type = other RNA
tggttcactgaagacccagtt

SEQ ID NO: 404 - DNA, 21 bp, synthetic construct
  misc_feature 1..21: note = Description of Combined DNA/RNA Molecule: Synthetic oligonucleotide
  modified_base 2..3: mod_base = OTHER; note = uracil
  modified_base 6: mod_base = OTHER; note = uracil
  modified_base 9: mod_base = OTHER; note = uracil
  modified_base 13: mod_base = OTHER; note = uracil
  modified_base 17..19: mod_base = OTHER; note = uracil
  source 1..21: mol_type = other DNA
attcctgctcaatggattttt

SEQ ID NO: 405 - DNA, 23 bp, synthetic construct
  misc_feature 1..23: note = Description of Artificial Sequence: Synthetic oligonucleotide
  source 1..23: mol_type = other DNA
tagagcctggctgggttgttttg

SEQ ID NO: 406 - DNA, 21 bp, synthetic construct
  misc_feature 1..21: note = Description of Artificial Sequence: Synthetic oligonucleotide
  source 1..21: mol_type = other DNA
aaccacaacacaaagtcacag

SEQ ID NO: 407 - RNA, 22 nt, synthetic construct
  misc_feature 1..22: note = Description of Artificial Sequence: Synthetic oligonucleotide
  source 1..22: mol_type = other RNA
aaaccggcaggagtttacccag

SEQ ID NO: 408 - RNA, 21 nt, synthetic construct
  misc_feature 1..21: note = Description of Artificial Sequence: Synthetic oligonucleotide
  source 1..21: mol_type = other RNA
aaggtggccattaaggtgatt

SEQ ID NO: 409 - RNA, 19 nt, synthetic construct
  misc_feature 1..19: note = Description of Artificial Sequence: Synthetic oligonucleotide
  source 1..19: mol_type = other RNA
tcagaagaccacaatctac

SEQ ID NO: 410 - DNA, 21 bp, synthetic construct
  misc_feature 1..21: note = Description of Combined DNA/RNA Molecule: Synthetic oligonucleotide
  modified_base 2: mod_base = OTHER; note = uracil
  modified_base 7: mod_base = OTHER; note = uracil
  modified_base 13: mod_base = OTHER; note = uracil
  modified_base 17: mod_base = OTHER; note = uracil
  source 1..21: mol_type = other DNA
gtgaagtcaacatgcctgctt

SEQ ID NO: 411 - DNA, 21 bp, synthetic construct
  misc_feature 1..21: note = Description of Combined DNA/RNA Molecule: Synthetic oligonucleotide
  modified_base 6: mod_base = OTHER; note = uracil
  source 1..21: mol_type = other DNA
caccctacacgaagccagatt

SEQ ID NO: 412 - DNA, 21 bp, synthetic construct
  misc_feature 1..21: note = Description of Combined DNA/RNA Molecule: Synthetic oligonucleotide
  modified_base 8: mod_base = OTHER; note = uracil
  modified_base 14: mod_base = OTHER; note = uracil
  modified_base 17..19: mod_base = OTHER; note = uracil
  source 1..21: mol_type = other DNA
ggacagatgaagctgcttttt

SEQ ID NO: 413 - DNA, 20 bp, synthetic construct
  misc_feature 1..20: note = Description of Artificial Sequence: Synthetic oligonucleotide
  source 1..20: mol_type = other DNA
ggtggacaagaatgctagac

SEQ ID NO: 414 - DNA, 20 bp, synthetic construct
  misc_feature 1..20: note = Description of Artificial Sequence: Synthetic oligonucleotide
  source 1..20: mol_type = other DNA
gaaggattgaccagttaacc

SEQ ID NO: 415 - DNA, 20 bp, synthetic construct
  misc_feature 1..20: note = Description of Artificial Sequence: Synthetic oligonucleotide
  source 1..20: mol_type = other DNA
gcttgaacatgagcaagagc

SEQ ID NO: 416 - DNA, 21 bp, synthetic construct
  misc_feature 1..21: note = Description of Artificial Sequence: Synthetic oligonucleotide
  source 1..21: mol_type = other DNA
aacttccggcagaaacttctg

SEQ ID NO: 417 - DNA, 21 bp, synthetic construct
  misc_feature 1..21: note = Description of Combined DNA/RNA Molecule: Synthetic oligonucleotide
  modified_base 10: mod_base = OTHER; note = uracil
  modified_base 14: mod_base = OTHER; note = uracil
  modified_base 17: mod_base = OTHER; note = uracil
  modified_base 19: mod_base = OTHER; note = uracil
  source 1..21: mol_type = other DNA
gccacagcatacatcctgttt

SEQ ID NO: 418 - DNA, 21 bp, synthetic construct
  misc_feature 1..21: note = Description of Combined DNA/RNA Molecule: Synthetic oligonucleotide
  modified_base 8: mod_base = OTHER; note = uracil
  modified_base 11: mod_base = OTHER; note = uracil
  modified_base 14: mod_base = OTHER; note = uracil
  modified_base 19: mod_base = OTHER; note = uracil
  source 1..21: mol_type = other DNA
cgcacgctaatgctggcattt

SEQ ID NO: 419 - DNA, 23 bp, synthetic construct
  misc_feature 1..23: note = Description of Combined DNA/RNA Molecule: Synthetic oligonucleotide
  modified_base 7: mod_base = OTHER; note = uracil
  modified_base 9..11: mod_base = OTHER; note = uracil
  modified_base 13: mod_base = OTHER; note = uracil
  source 1..23: mol_type = other DNA
aagcggtgtttctcagaattgtt

SEQ ID NO: 420 - DNA, 21 bp, synthetic construct
  misc_feature 1..21: note = Description of Combined DNA/RNA Molecule: Synthetic oligonucleotide
  modified_base 2: mod_base = OTHER; note = uracil
  modified_base 17: mod_base = OTHER; note = uracil
  source 1..21: mol_type = other DNA
gtcggagggaagacagtgctt

SEQ ID NO: 421 - DNA, 21 bp, synthetic construct
  misc_feature 1..21: note = Description of Combined DNA/RNA Molecule: Synthetic oligonucleotide
  modified_base 4: mod_base = OTHER; note = uracil
  modified_base 6: mod_base = OTHER; note = uracil
  modified_base 9..10: mod_base = OTHER; note = uracil
  modified_base 13: mod_base = OTHER; note = uracil
  source 1..21: mol_type = other DNA
gcatgtgattgctgacgcctt

SEQ ID NO: 422 - DNA, 21 bp, synthetic construct
  misc_feature 1..21: note = Description of Artificial Sequence: Synthetic oligonucleotide
  source 1..21: mol_type = other DNA
aaggcttcccaactgatgcaa

SEQ ID NO: 423 - DNA, 21 bp, synthetic construct
  misc_feature 1..21: note = Description of Artificial Sequence: Synthetic oligonucleotide
  source 1..21: mol_type = other DNA
aagccaaggaagcattgggta

SEQ ID NO: 424 - DNA, 21 bp, synthetic construct
  misc_feature 1..21: note = Description of Artificial Sequence: Synthetic oligonucleotide
  source 1..21: mol_type = other DNA
aagtactagaaggagaggtgg

SEQ ID NO: 425 - DNA, 21 bp, synthetic construct
  misc_feature 1..21: note = Description of Artificial Sequence: Synthetic oligonucleotide
  source 1..21: mol_type = other DNA
gttcaaaagctggatgatctt

SEQ ID NO: 426 - DNA, 21 bp, synthetic construct
  misc_feature 1..21: note = Description of Artificial Sequence: Synthetic oligonucleotide
  source 1..21: mol_type = other DNA
aagatacggtccagaagctta

SEQ ID NO: 427 - DNA, 21 bp, synthetic construct
  misc_feature 1..21: note = Description of Artificial Sequence: Synthetic oligonucleotide
  source 1..21: mol_type = other DNA
ccagcggctcaaggaggtttt

SEQ ID NO: 428 - DNA, 21 bp, synthetic construct
  misc_feature 1..21: note = Description of Artificial Sequence: Synthetic oligonucleotide
  source 1..21: mol_type = other DNA
gagtcgggaccacagtttatt

SEQ ID NO: 429 - DNA, 21 bp, synthetic construct
  misc_feature 1..21: note = Description of Artificial Sequence: Synthetic oligonucleotide
  source 1..21: mol_type = other DNA
taggctaattgtactgctctt

SEQ ID NO: 430 - DNA, 21 bp, synthetic construct
  misc_feature 1..21: note = Description of Artificial Sequence: Synthetic oligonucleotide
  source 1..21: mol_type = other DNA
ggagatcctctacaaagggtt

SEQ ID NO: 431 - DNA, 21 bp, synthetic construct
  misc_feature 1..21: note = Description of Artificial Sequence: Synthetic oligonucleotide
  source 1..21: mol_type = other DNA
aagagatgctaatagcagttt

SEQ ID NO: 432 - DNA, 21 bp, synthetic construct
  misc_feature 1..21: note = Description of Artificial Sequence: Synthetic oligonucleotide
  source 1..21: mol_type = other DNA
actcttactgctctccagttt

SEQ ID NO: 433 - DNA, 21 bp, synthetic construct
  misc_feature 1..21: note = Description of Artificial Sequence: Synthetic oligonucleotide
  source 1..21: mol_type = other DNA
cgagacctatcgccgcatcgt

SEQ ID NO: 434 - DNA, 21 bp, synthetic construct
  misc_feature 1..21: note = Description of Artificial Sequence: Synthetic oligonucleotide
  source 1..21: mol_type = other DNA
gggcggctttgccaagtgctt

SEQ ID NO: 435 - DNA, 21 bp, synthetic construct
  misc_feature 1..21: note = Description of Combined DNA/RNA Molecule: Synthetic oligonucleotide
  modified_base 4: mod_base = OTHER; note = uracil
  modified_base 9: mod_base = OTHER; note = uracil
  modified_base 18: mod_base = OTHER; note = uracil
  source 1..21: mol_type = other DNA
ccctgagatcccagcgctgtt

SEQ ID NO: 436 - DNA, 19 bp, synthetic construct
  misc_feature 1..19: note = Description of Artificial Sequence: Synthetic oligonucleotide
  source 1..19: mol_type = other DNA
gatcaatggctacacagga

SEQ ID NO: 437 - DNA, 21 bp, synthetic construct
  misc_feature 1..21: note = Description of Combined DNA/RNA Molecule: Synthetic oligonucleotide
  modified_base 4: mod_base = OTHER; note = uracil
  modified_base 6: mod_base = OTHER; note = uracil
  modified_base 14..15: mod_base = OTHER; note = uracil
  modified_base 18: mod_base = OTHER; note = uracil
  source 1..21: mol_type = other DNA
acctgtcgaggacttcatctt

SEQ ID NO: 438 - DNA, 21 bp, synthetic construct
  misc_feature 1..21: note = Description of Combined DNA/RNA Molecule: Synthetic oligonucleotide
  modified_base 2: mod_base = OTHER; note = uracil
  modified_base 9: mod_base = OTHER; note = uracil
  source 1..21: mol_type = other DNA
gtacaaggtggagcgcaactt

SEQ ID NO: 439 - DNA, 19 bp, synthetic construct
  misc_feature 1..19: note = Description of Artificial Sequence: Synthetic oligonucleotide
  source 1..19: mol_type = other DNA
cccggaaatttcccgtccc

SEQ ID NO: 440 - DNA, 19 bp, synthetic construct
  misc_feature 1..19: note = Description of Artificial Sequence: Synthetic oligonucleotide
  source 1..19: mol_type = other DNA
gagatgacctgcattgccc

SEQ ID NO: 441 - DNA, 21 bp, synthetic construct
  misc_feature 1..21: note = Description of Combined DNA/RNA Molecule: Synthetic oligonucleotide
  modified_base 3: mod_base = OTHER; note = uracil
  modified_base 5..6: mod_base = OTHER; note = uracil
  modified_base 9..10: mod_base = OTHER; note = uracil
  source 1..21: mol_type = other DNA
actcttggttcagaaaggatt

SEQ ID NO: 442 - DNA, 19 bp, synthetic construct
  misc_feature 1..19: note = Description of Artificial Sequence: Synthetic oligonucleotide
  source 1..19: mol_type = other DNA
ggttcactactagtaaact

SEQ ID NO: 443 - DNA, 19 bp, synthetic construct
  misc_feature 1..19: note = Description of Artificial Sequence: Synthetic oligonucleotide
  source 1..19: mol_type = other DNA
ggaatctactcgtttgtat

SEQ ID NO: 444 - DNA, 21 bp, synthetic construct
  misc_feature 1..21: note = Description of Artificial Sequence: Synthetic oligonucleotide
  source 1..21: mol_type = other DNA
ccaagaaccagagaaaagatt

SEQ ID NO: 445 - DNA, 21 bp, synthetic construct
  misc_feature 1..21: note = Description of Combined DNA/RNA Molecule: Synthetic oligonucleotide
  modified_base 2: mod_base = OTHER; note = uracil
  modified_base 4..6: mod_base = OTHER; note = uracil
  modified_base 13: mod_base = OTHER; note = uracil
  source 1..21: mol_type = other DNA
ctctttagaaactgggcaatt

SEQ ID NO: 446 - DNA, 21 bp, synthetic construct
  misc_feature 1..21: note = Description of Artificial Sequence: Synthetic oligonucleotide
  source 1..21: mol_type = other DNA
aagactccagtggtaatctac

SEQ ID NO: 447 - DNA, 19 bp, synthetic construct
  misc_feature 1..19: note = Description of Artificial Sequence: Synthetic oligonucleotide
  source 1..19: mol_type = other DNA
tagagctacagaacgaaag

SEQ ID NO: 448 - DNA, 19 bp, synthetic construct
  misc_feature 1..19: note = Description of Artificial Sequence: Synthetic oligonucleotide
  source 1..19: mol_type = other DNA
gaatgtgaacaccaccaaa

SEQ ID NO: 449 - DNA, 19 bp, synthetic construct
  misc_feature 1..19: note = Description of Artificial Sequence: Synthetic oligonucleotide
  source 1..19: mol_type = other DNA
ctacacaaatattgaggat

SEQ ID NO: 450 - DNA, 19 bp, synthetic construct
  misc_feature 1..19: note = Description of Artificial Sequence: Synthetic oligonucleotide
  source 1..19: mol_type = other DNA
ctgtacttccatacttgat

SEQ ID NO: 451 - DNA, 21 bp, synthetic construct
  misc_feature 1..21: note = Description of Artificial Sequence: Synthetic oligonucleotide
  source 1..21: mol_type = other DNA
aagccaagacaaattctgtgt

SEQ ID NO: 452 - DNA, 21 bp, synthetic construct
  misc_feature 1..21: note = Description of Artificial Sequence: Synthetic oligonucleotide
  source 1..21: mol_type = other DNA
aacctccgtgatgttgcttga

SEQ ID NO: 453 - DNA, 19 bp, synthetic construct
  misc_feature 1..19: note = Description of Artificial Sequence: Synthetic oligonucleotide
  source 1..19: mol_type = other DNA
caaagccagaaacaagttg

SEQ ID NO: 454 - DNA, 19 bp, synthetic construct
  misc_feature 1..19: note = Description of Artificial Sequence: Synthetic oligonucleotide
  source 1..19: mol_type = other DNA
aaataaactctacctggtt

SEQ ID NO: 455 - DNA, 19 bp, synthetic construct
  misc_feature 1..19: note = Description of Artificial Sequence: Synthetic oligonucleotide
  source 1..19: mol_type = other DNA
aaacctcagaatctgctta

SEQ ID NO: 456 - DNA, 19 bp, synthetic construct
  misc_feature 1..19: note = Description of Artificial Sequence: Synthetic oligonucleotide
  source 1..19: mol_type = other DNA
gttacttctatgcctgatt

SEQ ID NO: 457 - DNA, 23 bp, synthetic construct
  misc_feature 1..23: note = Description of Combined DNA/RNA Molecule: Synthetic oligonucleotide
  modified_base 12: mod_base = OTHER; note = uracil
  modified_base 19..20: mod_base = OTHER; note = uracil
  source 1..23: mol_type = other DNA
gaccgagaaggtagacaattgtt

SEQ ID NO: 458 - DNA, 23 bp, synthetic construct
  misc_feature 1..23: note = Description of Combined DNA/RNA Molecule: Synthetic oligonucleotide
  source 1..23: mol_type = other DNA
aagaggcacaaggtccacatctt

SEQ ID NO: 459 - DNA, 21 bp, synthetic construct
  misc_feature 1..21: note = Description of Combined DNA/RNA Molecule: Synthetic oligonucleotide
  modified_base 2: mod_base = OTHER; note = uracil
  modified_base 8: mod_base = OTHER; note = uracil
  modified_base 14: mod_base = OTHER; note = uracil
  source 1..21: mol_type = other DNA
atgcagctggagatggcactt

SEQ ID NO: 460 - DNA, 21 bp, synthetic construct
  misc_feature 1..21: note = Description of Combined DNA/RNA Molecule: Synthetic oligonucleotide
  modified_base 7..8: mod_base = OTHER; note = uracil
  modified_base 16: mod_base = OTHER; note = uracil
  source 1..21: mol_type = other DNA
aggaagttggaaggatccatt

SEQ ID NO: 461 - RNA, 21 nt, synthetic construct
  misc_feature 1..21: note = Description of Artificial Sequence: Synthetic oligonucleotide
  source 1..21: mol_type = other RNA
gaacacttatcaagcctaatt

SEQ ID NO: 462 - RNA, 21 nt, synthetic construct
  misc_feature 1..21: note = Description of Artificial Sequence: Synthetic oligonucleotide
  source 1..21: mol_type = other RNA
ggagagaacaagcatattttt

SEQ ID NO: 463 - RNA, 21 nt, synthetic construct
  misc_feature 1..21: note = Description of Artificial Sequence: Synthetic oligonucleotide
  source 1..21: mol_type = other RNA
tgatgtacctattctcttatt

SEQ ID NO: 464 - RNA, 21 nt, synthetic construct
  misc_feature 1..21: note = Description of Artificial Sequence: Synthetic oligonucleotide
  source 1..21: mol_type = other RNA
gataagagatttcagaagatt

SEQ ID NO: 465 - DNA, 21 bp, synthetic construct
  misc_feature 1..21: note = Description of Combined DNA/RNA Molecule: Synthetic oligonucleotide
  modified_base 2: mod_base = OTHER; note = uracil
  source 1..21: mol_type = other DNA
gtcaccacagcgcaatggatt

SEQ ID NO: 466 - DNA, 21 bp, synthetic construct
  misc_feature 1..21: note = Description of Combined DNA/RNA Molecule: Synthetic oligonucleotide
  modified_base 3: mod_base = OTHER; note = uracil
  modified_base 5: mod_base = OTHER; note = uracil
  modified_base 9: mod_base = OTHER; note = uracil
  modified_base 12: mod_base = OTHER; note = uracil
  modified_base 18..19: mod_base = OTHER; note = uracil
  source 1..21: mol_type = other DNA
actctagatgctcagactttt

SEQ ID NO: 467 - DNA, 21 bp, synthetic construct
  misc_feature 1..21: note = Description of Artificial Sequence: Synthetic oligonucleotide
  source 1..21: mol_type = other DNA
aggatccatcttcctggttac

SEQ ID NO: 468 - DNA, 21 bp, synthetic construct
  misc_feature 1..21: note = Description of Combined DNA/RNA Molecule: Synthetic oligonucleotide
  modified_base 1: mod_base = OTHER; note = uracil
  source 1..21: mol_type = other DNA
taacaccagtacggacgggtt

SEQ ID NO: 469 - RNA, 19 nt, synthetic construct
  misc_feature 1..19: note = Description of Artificial Sequence: Synthetic oligonucleotide
  source 1..19: mol_type = other RNA
tgctcctctcatgtgggat

SEQ ID NO: 470 - RNA, 19 nt, synthetic construct
  misc_feature 1..19: note = Description of Artificial Sequence: Synthetic oligonucleotide
  source 1..19: mol_type = other RNA
tcattggtcagttgtcatc

SEQ ID NO: 471 - RNA, 19 nt, synthetic construct
  misc_feature 1..19: note = Description of Artificial Sequence: Synthetic oligonucleotide
  source 1..19: mol_type = other RNA
gagacttgggcggtcaaat

SEQ ID NO: 472 - RNA, 19 nt, synthetic construct
  misc_feature 1..19: note = Description of Artificial Sequence: Synthetic oligonucleotide
  source 1..19: mol_type = other RNA
cggtgacactcagtatgtc

SEQ ID NO: 473 - RNA, 21 nt, synthetic construct
  misc_feature 1..21: note = Description of Artificial Sequence: Synthetic oligonucleotide
  source 1..21: mol_type = other RNA
aagcatgaccagcctgcttac

SEQ ID NO: 474 - DNA, 21 bp, synthetic construct
  misc_feature 1..21: note = Description of Combined DNA/RNA Molecule: Synthetic oligonucleotide
  modified_base 3..4: mod_base = OTHER; note = uracil
  modified_base 6: mod_base = OTHER; note = uracil
  modified_base 9..10: mod_base = OTHER; note = uracil
  modified_base 14: mod_base = OTHER; note = uracil
  modified_base 17: mod_base = OTHER; note = uracil
  source 1..21: mol_type = other DNA
ggttgtccttgagtaataatt

SEQ ID NO: 475 - RNA, 21 nt, synthetic construct
  misc_feature 1..21: note = Description of Artificial Sequence: Synthetic oligonucleotide
  source 1..21: mol_type = other RNA
gtctggtacgactggagtacc

SEQ ID NO: 476 - DNA, 21 bp, synthetic construct
  misc_feature 1..21: note = Description of Artificial Sequence: Synthetic oligonucleotide
  source 1..21: mol_type = other DNA
aacattcactggtgcaactgc

SEQ ID NO: 477 - DNA, 21 bp, synthetic construct
  misc_feature 1..21: note = Description of Artificial Sequence: Synthetic oligonucleotide
  source 1..21: mol_type = other DNA
aacaacatcttcctacatgag

SEQ ID NO: 478 - DNA, 21 bp, synthetic construct
  misc_feature 1..21: note = Description of Artificial Sequence: Synthetic oligonucleotide
  source 1..21: mol_type = other DNA
aaagaattggatctggatcat

SEQ ID NO: 479 - RNA, 21 nt, synthetic construct
  misc_feature 1..21: note = Description of Artificial Sequence: Synthetic oligonucleotide
  source 1..21: mol_type = other RNA
aatagttcagcagtttggcta

SEQ ID NO: 480 - DNA, 21 bp, synthetic construct
  misc_feature 1..21: note = Description of Artificial Sequence: Synthetic oligonucleotide
  source 1..21: mol_type = other DNA
gaatttaaaaccagaattatc

SEQ ID NO: 481 - DNA, 21 bp, synthetic construct
  misc_feature 1..21: note = Description of Artificial Sequence: Synthetic oligonucleotide
  source 1..21: mol_type = other DNA
aagcgaagcagtggttcaggt

SEQ ID NO: 482 - RNA, 21 nt, synthetic construct
  misc_feature 1..21: note = Description of Artificial Sequence: Synthetic oligonucleotide
  source 1..21: mol_type = other RNA
agacgagctgagcgagaagca

SEQ ID NO: 483 - DNA, 21 bp, synthetic construct
  misc_feature 1..21: note = Description of Combined DNA/RNA Molecule: Synthetic oligonucleotide
  modified_base 3: mod_base = OTHER; note = uracil
  modified_base 5: mod_base = OTHER; note = uracil
  source 1..21: mol_type = other DNA
catctacaagcccaacaactt

SEQ ID NO: 484 - RNA, 19 nt, synthetic construct
  misc_feature 1..19: note = Description of Artificial Sequence: Synthetic oligonucleotide
  source 1..19: mol_type = other RNA
cttcgactttgtcaccgag

SEQ ID NO: 485 - DNA, 21 bp, synthetic construct
  misc_feature 1..21: note = Description of Artificial Sequence: Synthetic oligonucleotide
  source 1..21: mol_type = other DNA
aacctgtctccacaaagtgtg

SEQ ID NO: 486 - DNA, 21 bp, synthetic construct
  misc_feature 1..21: note = Description of Combined DNA/RNA Molecule: Synthetic oligonucleotide
  modified_base 18: mod_base = OTHER; note = uracil
  source 1..21: mol_type = other DNA
caacaagaagacgcgaatctt

SEQ ID NO: 487 - RNA, 21 nt, synthetic construct
  misc_feature 1..21: note = Description of Artificial Sequence: Synthetic oligonucleotide
  source 1..21: mol_type = other RNA
aatcgcctaggaagactgatc

SEQ ID NO: 488 - RNA, 21 nt, synthetic construct
  misc_feature 1..21: note = Description of Artificial Sequence: Synthetic oligonucleotide
  source 1..21: mol_type = other RNA
cccctgtagcggccaaacatt

SEQ ID NO: 489 - RNA, 21 nt, synthetic construct
  misc_feature 1..21: note = Description of Artificial Sequence: Synthetic oligonucleotide
  source 1..21: mol_type = other RNA
caaagtacaaaggaatttatt

SEQ ID NO: 490 - RNA, 21 nt, synthetic construct
  misc_feature 1..21: note = Description of Artificial Sequence: Synthetic oligonucleotide
  source 1..21: mol_type = other RNA
cgggagggacagactttcttt

SEQ ID NO: 491 - DNA, 21 bp, synthetic construct
  misc_feature 1..21: note = Description of Artificial Sequence: Synthetic oligonucleotide
  source 1..21: mol_type = other DNA
gtgaaccacaactccgtattc

SEQ ID NO: 492 - RNA, 21 nt, synthetic construct
  misc_feature 1..21: note = Description of Artificial Sequence: Synthetic oligonucleotide
  source 1..21: mol_type = other RNA
aactggttgacgaaagtggtg

SEQ ID NO: 493 - RNA, 21 nt, synthetic construct
  misc_feature 1..21: note = Description of Artificial Sequence: Synthetic oligonucleotide
  source 1..21: mol_type = other RNA
aacccgcgttggcgtggttga

SEQ ID NO: 494 - DNA, 21 bp, synthetic construct
  misc_feature 1..21: note = Description of Combined DNA/RNA Molecule: Synthetic oligonucleotide
  modified_base 6: mod_base = OTHER; note = uracil
  modified_base 17: mod_base = OTHER; note = uracil
  source 1..21: mol_type = other DNA
accaatccagcacccatcctt

SEQ ID NO: 495 - DNA, 21 bp, synthetic construct
  misc_feature 1..21: note = Description of Combined DNA/RNA Molecule: Synthetic oligonucleotide
  modified_base 2: mod_base = OTHER; note = uracil
  modified_base 5: mod_base = OTHER; note = uracil
  modified_base 16..17: mod_base = OTHER; note = uracil
  source 1..21: mol_type = other DNA
ctgatgaccagcaacttgatt

SEQ ID NO: 496 - DNA, 21 bp, synthetic construct
  misc_feature 1..21: note = Description of Combined DNA/RNA Molecule: Synthetic oligonucleotide
  modified_base 5: mod_base = OTHER; note = uracil
  modified_base 14..15: mod_base = OTHER; note = uracil
  source 1..21: mol_type = other DNA
gagctgcaaggccttgccctt

SEQ ID NO: 497 - DNA, 26 bp, synthetic construct
  misc_feature 1..26: note = Description of Artificial Sequence: Synthetic oligonucleotide
  source 1..26: mol_type = other DNA
ctcctccattgtggaacccaaggagc

SEQ ID NO: 498 - RNA, 21 nt, synthetic construct
  misc_feature 1..21: note = Description of Artificial Sequence: Synthetic oligonucleotide
  source 1..21: mol_type = other RNA
gtatggacactgactcagatt

SEQ ID NO: 499 - RNA, 21 nt, synthetic construct
  misc_feature 1..21: note = Description of Artificial Sequence: Synthetic oligonucleotide
  source 1..21: mol_type = other RNA
gtacttccagctagatgtttt

SEQ ID NO: 500 - RNA, 19 nt, synthetic construct
  misc_feature 1..19: note = Description of Artificial Sequence: Synthetic oligonucleotide
  source 1..19: mol_type = other RNA
gagcgaaacctgctctcag

SEQ ID NO: 501 - RNA, 19 nt, synthetic construct
  misc_feature 1..19: note = Description of Artificial Sequence: Synthetic oligonucleotide
  source 1..19: mol_type = other RNA
gggtgactactaccgctac

SEQ ID NO: 502 - RNA, 19 nt, synthetic construct
  misc_feature 1..19: note = Description of Artificial Sequence: Synthetic oligonucleotide
  source 1..19: mol_type = other RNA
agacagcaccctcatcatg

SEQ ID NO: 503 - DNA, 21 bp, synthetic construct
  misc_feature 1..21: note = Description of Combined DNA/RNA Molecule: Synthetic oligonucleotide
  modified_base 2: mod_base = OTHER; note = uracil
  modified_base 5: mod_base = OTHER; note = uracil
  modified_base 8: mod_base = OTHER; note = uracil
  modified_base 15..16: mod_base = OTHER; note = uracil
  source 1..21: mol_type = other DNA
gtcctggtggcgagttcgatt

SEQ ID NO: 504 - DNA, 21 bp, synthetic construct
  misc_feature 1..21: note = Description of Combined DNA/RNA Molecule: Synthetic oligonucleotide
  modified_base 3: mod_base = OTHER; note = uracil
  modified_base 5: mod_base = OTHER; note = uracil
  modified_base 7: mod_base = OTHER; note = uracil
  modified_base 9: mod_base = OTHER; note = uracil
  modified_base 14: mod_base = OTHER; note = uracil
  source 1..21: mol_type = other DNA
cgtctctatgacctcaacatt

SEQ ID NO: 505 - RNA, 21 nt, synthetic construct
  misc_feature 1..21: note = Description of Artificial Sequence: Synthetic oligonucleotide
  source 1..21: mol_type = other RNA
atgaagagtcttccaatcctt

SEQ ID NO: 506 - DNA, 21 bp, synthetic construct
  misc_feature 1..21: note = Description of Artificial Sequence: Synthetic oligonucleotide
  source 1..21: mol_type = other DNA
aaggtccacttcgtatgctgg

SEQ ID NO: 507 - DNA, 21 bp, synthetic construct
  misc_feature 1..21: note = Description of Artificial Sequence: Synthetic oligonucleotide
  source 1..21: mol_type = other DNA
aagggcaagtttcccgtgcag

SEQ ID NO: 508 - DNA, 21 bp, synthetic construct
  misc_feature 1..21: note = Description of Artificial Sequence: Synthetic oligonucleotide
  source 1..21: mol_type = other DNA
aagaaggcagatgaggggtta

SEQ ID NO: 509 - RNA, 21 nt, synthetic construct
  misc_feature 1..21: note = Description of Artificial Sequence: Synthetic oligonucleotide
  source 1..21: mol_type = other RNA
aatcaaaggctatgtctggcg

SEQ ID NO: 510 - RNA, 21 nt, synthetic construct
  misc_feature 1..21: note = Description of Artificial Sequence: Synthetic oligonucleotide
  source 1..21: mol_type = other RNA
aaggactacgccgactctatt

SEQ ID NO: 511 - DNA, 21 bp, synthetic construct
  misc_feature 1..21: note = Description of Artificial Sequence: Synthetic oligonucleotide
  source 1..21: mol_type = other DNA
cgcctctttcccagtccatgt

SEQ ID NO: 512 - DNA, 21 bp, synthetic construct
  misc_feature 1..21: note = Description of Artificial Sequence: Synthetic oligonucleotide
  source 1..21: mol_type = other DNA
gagctgagtgctcaggctaaa

SEQ ID NO: 513 - DNA, 21 bp, synthetic construct
  misc_feature 1..21: note = Description of Combined DNA/RNA Molecule: Synthetic oligonucleotide
  modified_base 3: mod_base = OTHER; note = uracil
  modified_base 10..12: mod_base = OTHER; note = uracil
  source 1..21: mol_type = other DNA
agtggcccgtttccagcggtt

SEQ ID NO: 514 - DNA, 21 bp, synthetic construct
  misc_feature 1..21: note = Description of Artificial Sequence: Synthetic oligonucleotide
  source 1..21: mol_type = other DNA
aaggtgattggtagaggtgca

SEQ ID NO: 515 - DNA, 21 bp, synthetic construct
  misc_feature 1..21: note = Description of Artificial Sequence: Synthetic oligonucleotide
  source 1..21: mol_type = other DNA
aagcacaaaagcttgtctcca

SEQ ID NO: 516 - RNA, 19 nt, synthetic construct
  misc_feature 1..19: note = Description of Artificial Sequence: Synthetic oligonucleotide
  source 1..19: mol_type = other RNA
ggaattcatggcctttgtt

SEQ ID NO: 517 - DNA, 21 bp, synthetic construct
  misc_feature 1..21: note = Description of Combined DNA/RNA Molecule: Synthetic oligonucleotide
  modified_base 3: mod_base = OTHER; note = uracil
  modified_base 5: mod_base = OTHER; note = uracil
  modified_base 10..12: mod_base = OTHER; note = uracil
  source 1..21: mol_type = other DNA
gatctcaagtttcaacacctt

SEQ ID NO: 518 - DNA, 21 bp, synthetic construct
  misc_feature 1..21: note = Description of Combined DNA/RNA Molecule: Synthetic oligonucleotide
  modified_base 2: mod_base = OTHER; note = uracil
  modified_base 4: mod_base = OTHER; note = uracil
  modified_base 6: mod_base = OTHER; note = uracil
  source 1..21: mol_type = other DNA
gtctgtaaagaccaagggatt

SEQ ID NO: 519 - DNA, 21 bp, synthetic construct
  misc_feature 1..21: note = Description of Combined DNA/RNA Molecule: Synthetic oligonucleotide
  modified_base 9: mod_base = OTHER; note = uracil
  modified_base 12: mod_base = OTHER; note = uracil
  modified_base 18: mod_base = OTHER; note = uracil
  source 1..21: mol_type = other DNA
ggagcaagtagtggggctgtt

SEQ ID NO: 520 - DNA, 21 bp, synthetic construct
  misc_feature 1..21: note = Description of Combined DNA/RNA Molecule: Synthetic oligonucleotide
  modified_base 2: mod_base = OTHER; note = uracil
  modified_base 6: mod_base = OTHER; note = uracil
  modified_base 10..11: mod_base = OTHER; note = uracil
  modified_base 13: mod_base = OTHER; note = uracil
  modified_base 18: mod_base = OTHER; note = uracil
  source 1..21: mol_type = other DNA
gtacatccattataagctgtt

SEQ ID NO: 521 - DNA, 23 bp, synthetic construct
  misc_feature 1..23: note = Description of Artificial Sequence: Synthetic oligonucleotide
  source 1..23: mol_type = other DNA
aacttccagctggcatataggtt

SEQ ID NO: 522 - DNA, 23 bp, synthetic construct
  misc_feature 1..23: note = Description of Combined DNA/RNA Molecule: Synthetic oligonucleotide
  modified_base 6: mod_base = OTHER; note = uracil
  modified_base 9: mod_base = OTHER; note = uracil
  modified_base 12: mod_base = OTHER; note = uracil
  modified_base 14: mod_base = OTHER; note = uracil
  modified_base 16: mod_base = OTHER; note = uracil
  modified_base 21: mod_base = OTHER; note = uracil
  source 1..23: mol_type = other DNA
aagggtcatgctctatcagattt

SEQ ID NO: 523 - DNA, 23 bp, synthetic construct
  misc_feature 1..23: note = Description of Combined DNA/RNA Molecule: Synthetic oligonucleotide
  modified_base 10: mod_base = OTHER; note = uracil
  modified_base 13: mod_base = OTHER; note = uracil
  modified_base 20: mod_base = OTHER; note = uracil
  source 1..23: mol_type = other DNA
aagaagacatcatccggaatatt

SEQ ID NO: 524 - DNA, 23 bp, synthetic construct
  misc_feature 1..23: note = Description of Combined DNA/RNA Molecule: Synthetic oligonucleotide
  modified_base 8: mod_base = OTHER; note = uracil
  modified_base 13: mod_base = OTHER; note = uracil
  modified_base 18: mod_base = OTHER; note = uracil
  modified_base 21: mod_base = OTHER; note = uracil
  source 1..23: mol_type = other DNA
aaggagataccgtgcggtgcttt

SEQ ID NO: 525 - DNA, 19 bp, synthetic construct
  misc_feature 1..19: note = Description of Artificial Sequence: Synthetic oligonucleotide
  source 1..19: mol_type = other DNA
ccggacagttccatgtata

SEQ ID NO: 526 - DNA, 21 bp, synthetic construct
  misc_feature 1..21: note = Description of Combined DNA/RNA Molecule: Synthetic oligonucleotide
  modified_base 12..13: mod_base = OTHER; note = uracil
  modified_base 19: mod_base = OTHER; note = uracil
  source 1..21: mol_type = other DNA
ggagaaaagccttacagattt

SEQ ID NO: 527 - DNA, 21 bp, synthetic construct
  misc_feature 1..21: note = Description of Combined DNA/RNA Molecule: Synthetic oligonucleotide
  modified_base 2: mod_base = OTHER; note = uracil
  modified_base 4..6: mod_base = OTHER; note = uracil
  source 1..21: mol_type = other DNA
gtatttggccgccgacgcatt

SEQ ID NO: 528 - DNA, 21 bp, synthetic construct
  misc_feature 1..21: note = Description of Artificial Sequence: Synthetic oligonucleotide
  source 1..21: mol_type = other DNA
aagactggagaaagtggcatg

SEQ ID NO: 529 - DNA, 23 bp, synthetic construct
  misc_feature 1..23: note = Description of Combined DNA/RNA Molecule: Synthetic oligonucleotide
  modified_base 3: mod_base = OTHER; note = uracil
  modified_base 7: mod_base = OTHER; note = uracil
  modified_base 9: mod_base = OTHER; note = uracil
  modified_base 17..19: mod_base = OTHER; note = uracil
  source 1..23: mol_type = other DNA
aatcactgtggagacatttgctt

SEQ ID NO: 530 - DNA, 23 bp, synthetic construct
  misc_feature 1..23: note = Description of Combined DNA/RNA Molecule: Synthetic oligonucleotide
  modified_base 3: mod_base = OTHER; note = uracil
  modified_base 16..17: mod_base = OTHER; note = uracil
  modified_base 21: mod_base = OTHER; note = uracil
  source 1..23: mol_type = other DNA
aatgaagagggacacttcccttt

SEQ ID NO: 531 - DNA, 23 bp, synthetic construct
  misc_feature 1..23: note = Description of Combined DNA/RNA Molecule: Synthetic oligonucleotide
  modified_base 5: mod_base = OTHER; note = uracil
  modified_base 9: mod_base = OTHER; note = uracil
  modified_base 18: mod_base = OTHER; note = uracil
  modified_base 20: mod_base = OTHER; note = uracil
  source 1..23: mol_type = other DNA
aacctcgctgcaaagaatgtgtt

SEQ ID NO: 532 - DNA, 23 bp, synthetic construct
  misc_feature 1..23: note = Description of Combined DNA/RNA Molecule: Synthetic oligonucleotide
  modified_base 4: mod_base = OTHER; note = uracil
  modified_base 8: mod_base = OTHER; note = uracil
  modified_base 10: mod_base = OTHER; note = uracil
  modified_base 12..13: mod_base = OTHER; note = uracil
  modified_base 15: mod_base = OTHER; note = uracil
  modified_base 18: mod_base = OTHER; note = uracil
  source 1..23: mol_type = other DNA
aactccatctgttctcctgactt

SEQ ID NO: 533 - DNA, 23 bp, synthetic construct
  misc_feature 1..23: note = Description of Combined DNA/RNA Molecule: Synthetic oligonucleotide
  modified_base 5..7: mod_base = OTHER; note = uracil
  modified_base 10..11: mod_base = OTHER; note = uracil
  modified_base 20..21: mod_base = OTHER; note = uracil
  source 1..23: mol_type = other DNA
aaagtttgcttggcacacctttt

SEQ ID NO: 534 - DNA, 20 bp, synthetic construct
  misc_feature 1..20: note = Description of Artificial Sequence: Synthetic oligonucleotide
  source 1..20: mol_type = other DNA
aaggcctaatgccgaacaca

SEQ ID NO: 535 - DNA, 21 bp, synthetic construct
  misc_feature 1..21: note = Description of Artificial Sequence: Synthetic oligonucleotide
  source 1..21: mol_type = other DNA
aactttggctgccatcatcca

SEQ ID NO: 536 - DNA, 21 bp, synthetic construct
  misc_feature 1..21: note = Description of Combined DNA/RNA Molecule: Synthetic oligonucleotide
  modified_base 1: mod_base = OTHER; note = uracil
  modified_base 6: mod_base = OTHER; note = uracil
  source 1..21: mol_type = other DNA
taagctccaagagaaaggctt

SEQ ID NO: 537 - DNA, 19 bp, synthetic construct
  misc_feature 1..19: note = Description of Combined DNA/RNA Molecule: Synthetic oligonucleotide
  modified_base 5: mod_base = OTHER; note = uracil
  modified_base 7: mod_base = OTHER; note = uracil
  modified_base 11..13: mod_base = OTHER; note = uracil
  modified_base 17: mod_base = OTHER; note = uracil
  source 1..19: mol_type = other DNA
gccctatccctttacgtca

SEQ ID NO: 538 - DNA, 39 bp, synthetic construct
  misc_feature 1..39: note = Description of Artificial Sequence: Synthetic oligonucleotide
  source 1..39: mol_type = other DNA
gtggaccatgcactgcatgcctatagtgagtcgtattac

SEQ ID NO: 539 - DNA, 19 bp, synthetic construct
  misc_feature 1..19: note = Description of Artificial Sequence: Synthetic oligonucleotide
  source 1..19: mol_type = other DNA
agatcctggctaactgttc

SEQ ID NO: 540 - DNA, 19 bp, synthetic construct
  misc_feature 1..19: note = Description of Artificial Sequence: Synthetic oligonucleotide
  source 1..19: mol_type = other DNA
tacggactcaccttgcttg

SEQ ID NO: 541 - DNA, 21 bp, synthetic construct
  misc_feature 1..21: note = Description of Combined DNA/RNA Molecule: Synthetic oligonucleotide
  modified_base 2: mod_base = OTHER; note = uracil
  modified_base 11: mod_base = OTHER; note = uracil
  modified_base 13: mod_base = OTHER; note = uracil
  modified_base 15..17: mod_base = OTHER; note = uracil
  source 1..21: mol_type = other DNA
ctggacacagtgtgtttgatt

SEQ ID NO: 542 - DNA, 21 bp, synthetic construct
  misc_feature 1..21: note = Description of Combined DNA/RNA Molecule: Synthetic oligonucleotide
  modified_base 2: mod_base = OTHER; note = uracil
  modified_base 5: mod_base = OTHER; note = uracil
  modified_base 16..17: mod_base = OTHER; note = uracil
  source 1..21: mol_type = other DNA
ctgatgaccagcaacttgatt

SEQ ID NO: 543 - DNA, 21 bp, synthetic construct
  misc_feature 1..21: note = Description of Combined DNA/RNA Molecule: Synthetic oligonucleotide
  modified_base 3: mod_base = OTHER; note = uracil
  modified_base 5..6: mod_base = OTHER; note = uracil
  modified_base 12: mod_base = OTHER; note = uracil
  source 1..21: mol_type = other DNA
gctcttcgccatggacacatt

SEQ ID NO: 544 - DNA, 21 bp, synthetic construct
  misc_feature 1..21: note = Description of Combined DNA/RNA Molecule: Synthetic oligonucleotide
  modified_base 9: mod_base = OTHER; note = uracil
  modified_base 14: mod_base = OTHER; note = uracil
  modified_base 16: mod_base = OTHER; note = uracil
  source 1..21: mol_type = other DNA
gcgacagctggagtatgaatt

SEQ ID NO: 545 - DNA, 20 bp, synthetic construct
  misc_feature 1..20: note = Description of Combined DNA/RNA Molecule: Synthetic oligonucleotide
  modified_base 4: mod_base = OTHER; note = uracil
  modified_base 13..14: mod_base = OTHER; note = uracil
  modified_base 16: mod_base = OTHER; note = uracil
  source 1..20: mol_type = other DNA
ccatgagcaccgttctcctt

SEQ ID NO: 546 - DNA, 21 bp, synthetic construct
  misc_feature 1..21: note = Description of Combined DNA/RNA Molecule: Synthetic oligonucleotide
  modified_base 2..3: mod_base = OTHER; note = uracil
  modified_base 15: mod_base = OTHER; note = uracil
  source 1..21: mol_type = other DNA
cttgaccaaggagctcaactt

SEQ ID NO: 547 - DNA, 21 bp, synthetic construct
  misc_feature 1..21: note = Description of Combined DNA/RNA Molecule: Synthetic oligonucleotide
  modified_base 6: mod_base = OTHER; note = uracil
  modified_base 11..12: mod_base = OTHER; note = uracil
  source 1..21: mol_type = other DNA
ggagctcaacttcaccacctt

SEQ ID NO: 548 - DNA, 21 bp, synthetic construct
  misc_feature 1..21: note = Description of Combined DNA/RNA Molecule: Synthetic oligonucleotide
  modified_base 8: mod_base = OTHER; note = uracil
  modified_base 12..13: mod_base = OTHER; note = uracil
  source 1..21: mol_type = other DNA
cggccactcgcttccgggctt

SEQ ID NO: 549 - RNA, 19 nt, synthetic construct
  misc_feature 1..19: note = Description of Artificial Sequence: Synthetic oligonucleotide
  source 1..19: mol_type = other RNA
gctccgtcgactgcgcgcc

SEQ ID NO: 550 - DNA, 21 bp, synthetic construct
  misc_feature 1..21: note = Description of Artificial Sequence: Synthetic oligonucleotide
  source 1..21: mol_type = other DNA
aaaccaccgtggagctctact

SEQ ID NO: 551 - DNA, 21 bp, synthetic construct
  misc_feature 1..21: note = Description of Artificial Sequence: Synthetic oligonucleotide
  source 1..21: mol_type = other DNA
aagagcccgaccttctgtgaa

SEQ ID NO: 552 - DNA, 21 bp, synthetic construct
  misc_feature 1..21: note = Description of Combined DNA/RNA Molecule: Synthetic oligonucleotide
  modified_base 2..3: mod_base = OTHER; note = uracil
  modified_base 5..6: mod_base = OTHER; note = uracil
  modified_base 15..16: mod_base = OTHER; note = uracil
  modified_base 18: mod_base = OTHER; note = uracil
  source 1..21: mol_type = other DNA
gttcttccgccagattgtgtt

SEQ ID NO: 553 - RNA, 21 nt, synthetic construct
  misc_feature 1..21: note = Description of Artificial Sequence: Synthetic oligonucleotide
  source 1..21: mol_type = other RNA
cggactacccttagcacaatt

SEQ ID NO: 554 - RNA, 21 nt, synthetic construct
  misc_feature 1..21: note = Description of Artificial Sequence: Synthetic oligonucleotide
  source 1..21: mol_type = other RNA
gaatagtcaccatattcactt

SEQ ID NO: 555 - DNA, 19 bp, synthetic construct
  misc_feature 1..19: note = Description of Artificial Sequence: Synthetic oligonucleotide
  source 1..19: mol_type = other DNA
ggttccatcgaatcctgca

SEQ ID NO: 556 - DNA, 21 bp, synthetic construct
  misc_feature 1..21: note = Description of Artificial Sequence: Synthetic oligonucleotide
  source 1..21: mol_type = other DNA
aacaagatcaccttctccgag

SEQ ID NO: 557 - DNA, 21 bp, synthetic construct
  misc_feature 1..21: note = Description of Artificial Sequence: Synthetic oligonucleotide
  source 1..21: mol_type = other DNA
aactttgagaacatgagcaac

SEQ ID NO: 558 - DNA, 19 bp, synthetic construct
  misc_feature 1..19: note = Description of Artificial Sequence: Synthetic oligonucleotide
  source 1..19: mol_type = other DNA
cgtggatttatggtctgtg

SEQ ID NO: 559 - DNA, 21 bp, synthetic construct
  misc_feature 1..21: note = Description of Combined DNA/RNA Molecule: Synthetic oligonucleotide
  modified_base 1: mod_base = OTHER; note = uracil
  modified_base 5: mod_base = OTHER; note = uracil
  modified_base 7: mod_base = OTHER; note = uracil
  modified_base 9: mod_base = OTHER; note = uracil
  modified_base 11: mod_base = OTHER; note = uracil
  source 1..21: mol_type = other DNA
tggatgtctatcagcgcagtt

SEQ ID NO: 560 - DNA, 21 bp, synthetic construct
  misc_feature 1..21: note = Description of Combined DNA/RNA Molecule: Synthetic oligonucleotide
  modified_base 3: mod_base = OTHER; note = uracil
  modified_base 6: mod_base = OTHER; note = uracil
  modified_base 11: mod_base = OTHER; note = uracil
  modified_base 16: mod_base = OTHER; note = uracil
  source 1..21: mol_type = other DNA
gctactgccatccaatcgatt

SEQ ID NO: 561 - DNA, 21 bp, synthetic construct
  misc_feature 1..21: note = Description of Combined DNA/RNA Molecule: Synthetic oligonucleotide
  modified_base 5: mod_base = OTHER; note = uracil
  modified_base 10: mod_base = OTHER; note = uracil
  modified_base 13: mod_base = OTHER; note = uracil
  modified_base 18: mod_base = OTHER; note = uracil
  source 1..21: mol_type = other DNA
ggagtaccctgatgagatctt

SEQ ID NO: 562 - DNA, 21 bp, synthetic construct
  misc_feature 1..21: note = Description of Combined DNA/RNA Molecule: Synthetic oligonucleotide
  modified_base 2: mod_base = OTHER; note = uracil
  modified_base 9: mod_base = OTHER; note = uracil
  modified_base 16: mod_base = OTHER; note = uracil
  source 1..21: mol_type = other DNA
ctgaggagtccaacatcactt

SEQ ID NO: 563 - DNA, 21 bp, synthetic construct
  misc_feature 1..21: note = Description of Combined DNA/RNA Molecule: Synthetic oligonucleotide
  modified_base 15: mod_base = OTHER; note = uracil
  source 1..21: mol_type = other DNA
ccaaggccagcacataggatt

SEQ ID NO: 564 - DNA, 18 bp, synthetic construct
  misc_feature 1..18: note = Description of Artificial Sequence: Synthetic oligonucleotide
  source 1..18: mol_type = other DNA
gtcgtgacttgcgacaag

SEQ ID NO: 565 - DNA, 21 bp, synthetic construct
  misc_feature 1..21: note = Description of Combined DNA/RNA Molecule: Synthetic oligonucleotide
  modified_base 3: mod_base = OTHER; note = uracil
  modified_base 9..10: mod_base = OTHER; note = uracil
  modified_base 13: mod_base = OTHER; note = uracil
  modified_base 19: mod_base = OTHER; note = uracil
  source 1..21: mol_type = other DNA
gctggcagttcataggaattt

SEQ ID NO: 566 - DNA, 21 bp, synthetic construct
  misc_feature 1..21: note = Description of Combined DNA/RNA Molecule: Synthetic oligonucleotide
  modified_base 3: mod_base = OTHER; note = uracil
  modified_base 6: mod_base = OTHER; note = uracil
  modified_base 13: mod_base = OTHER; note = uracil
  modified_base 15: mod_base = OTHER; note = uracil
  modified_base 17..18: mod_base = OTHER; note = uracil
  source 1..21: mol_type = other DNA
cgtgctccaaagtctgttatt

SEQ ID NO: 567 - DNA, 21 bp, synthetic construct
  misc_feature 1..21: note = Description of Combined DNA/RNA Molecule: Synthetic oligonucleotide
  modified_base 1: mod_base = OTHER; note = uracil
  modified_base 5: mod_base = OTHER; note = uracil
  modified_base 7: mod_base = OTHER; note = uracil
  modified_base 9..10: mod_base = OTHER; note = uracil
  modified_base 12: mod_base = OTHER; note = uracil
  source 1..21: mol_type = other DNA
tcagtatgttgtgcaagagtt

SEQ ID NO: 568 - DNA, 21 bp, synthetic construct
  misc_feature 1..21: note = Description of Combined DNA/RNA Molecule: Synthetic oligonucleotide
  modified_base 6: mod_base = OTHER; note = uracil
  modified_base 9: mod_base = OTHER; note = uracil
  modified_base 11: mod_base = OTHER; note = uracil
  modified_base 16..17: mod_base = OTHER; note = uracil
  source 1..21: mol_type = other DNA
gaagatactctggaattcctt

SEQ ID NO: 569 - DNA, 21 bp, synthetic construct
  misc_feature 1..21: note = Description of Combined DNA/RNA Molecule: Synthetic oligonucleotide
  modified_base 2: mod_base = OTHER; note = uracil
  modified_base 6..8: mod_base = OTHER; note = uracil
  modified_base 18: mod_base = OTHER; note = uracil
  source 1..21: mol_type = other DNA
ctggatttcacagagactgtt

SEQ ID NO: 570 - DNA, 21 bp, synthetic construct
  misc_feature 1..21: note = Description of Combined DNA/RNA Molecule: Synthetic oligonucleotide
  modified_base 8: mod_base = OTHER; note = uracil
  modified_base 11: mod_base = OTHER; note = uracil
  modified_base 18: mod_base = OTHER; note = uracil
  source 1..21: mol_type = other DNA
gcagagatcatagagactgtt

SEQ ID NO: 571 - DNA, 21 bp, synthetic construct
  misc_feature 1..21: note = Description of Combined DNA/RNA Molecule: Synthetic oligonucleotide
  modified_base 4..6: mod_base = OTHER; note = uracil
  modified_base 9: mod_base = OTHER; note = uracil
  modified_base 15: mod_base = OTHER; note = uracil
  source 1..21: mol_type = other DNA
gactttcctcagaatgacgtt

SEQ ID NO: 572 - DNA, 21 bp, synthetic construct
  misc_feature 1..21: note = Description of Combined DNA/RNA Molecule: Synthetic oligonucleotide
  modified_base 3..4: mod_base = OTHER; note = uracil
  modified_base 7: mod_base = OTHER; note = uracil
  modified_base 13: mod_base = OTHER; note = uracil
  modified_base 15: mod_base = OTHER; note = uracil
  modified_base 17: mod_base = OTHER; note = uracil
  source 1..21: mol_type = other DNA
cattactccacctgtatcatt

SEQ ID NO: 573 - DNA, 21 bp, synthetic construct
  misc_feature 1..21: note = Description of Combined DNA/RNA Molecule: Synthetic oligonucleotide
  modified_base 4..6: mod_base = OTHER; note = uracil
  modified_base 12: mod_base = OTHER; note = uracil
  source 1..21: mol_type = other DNA
ggatttcaggatgaacacgtt

SEQ ID NO: 574 - DNA, 21 bp, synthetic construct
  misc_feature 1..21: note = Description of Combined DNA/RNA Molecule: Synthetic oligonucleotide
  modified_base 3: mod_base = OTHER; note = uracil
  modified_base 11..12: mod_base = OTHER; note = uracil
  source 1..21: mol_type = other DNA
gctgcaggacttccaccagtt

SEQ ID NO: 575 - RNA, 21 nt, synthetic construct
  misc_feature 1..21: note = Description of Artificial Sequence: Synthetic oligonucleotide
  source 1..21: mol_type = other RNA
aattggaacagctgcagcaga

SEQ ID NO: 576 - RNA, 21 nt, synthetic construct
  misc_feature 1..21: note = Description of Artificial Sequence: Synthetic oligonucleotide
  source 1..21: mol_type = other RNA
aagctctgatttatcaaaaga

SEQ ID NO: 577 - RNA, 19 nt, synthetic construct
  misc_feature 1..19: note = Description of Artificial Sequence: Synthetic oligonucleotide
  source 1..19: mol_type = other RNA
cccacaccattccattcta

SEQ ID NO: 578 - RNA, 23 nt, synthetic construct
  misc_feature 1..23: note = Description of Artificial Sequence: Synthetic oligonucleotide
  source 1..23: mol_type = other RNA
aagatgaggaagaaatcgatgtt

SEQ ID NO: 579 - RNA, 23 nt, synthetic construct
  misc_feature 1..23: note = Description of Artificial Sequence: Synthetic oligonucleotide
  source 1..23: mol_type = other RNA
aaaaggtcagagtctggatcacc

SEQ ID NO: 580 - RNA, 23 nt, synthetic construct
  misc_feature 1..23: note = Description of Artificial Sequence: Synthetic oligonucleotide
  source 1..23: mol_type = other RNA
cacgtctccacacatcagcacaa

SEQ ID NO: 581 - RNA, 23 nt, synthetic construct
  misc_feature 1..23: note = Description of Artificial Sequence: Synthetic oligonucleotide
  source 1..23: mol_type = other RNA
aaatgagataaaggtggctaatt

SEQ ID NO: 582 - RNA, 19 nt, synthetic construct
  misc_feature 1..19: note = Description of Artificial Sequence: Synthetic oligonucleotide
  source 1..19: mol_type = other RNA
tggttgcattgtccatggc

SEQ ID NO: 583 - DNA, 19 bp, synthetic construct
  misc_feature 1..19: note = Description of Artificial Sequence: Synthetic oligonucleotide
  source 1..19: mol_type = other DNA
gatcgctgtgtgtctgtaa

SEQ ID NO: 584 - DNA, 19 bp, synthetic construct
  misc_feature 1..19: note = Description of Artificial Sequence: Synthetic oligonucleotide
  source 1..19: mol_type = other DNA
gtccgtatgtaaatcagat

SEQ ID NO: 585 - DNA, 19 bp, synthetic construct
  misc_feature 1..19: note = Description of Artificial Sequence: Synthetic oligonucleotide
  source 1..19: mol_type = other DNA
cataccatctctaccgacg

SEQ ID NO: 586 - DNA, 19 bp, synthetic construct
  misc_feature 1..19: note = Description of Artificial Sequence: Synthetic oligonucleotide
  source 1..19: mol_type = other DNA
actgaagtctcggccagct

SEQ ID NO: 587 - DNA, 19 bp, synthetic construct
  misc_feature 1..19: note = Description of Artificial Sequence: Synthetic oligonucleotide
  source 1..19: mol_type = other DNA
gaaactcgtcgcatcttcc

SEQ ID NO: 588 - DNA, 21 bp, synthetic construct
  misc_feature 1..21: note = Description of Combined DNA/RNA Molecule: Synthetic oligonucleotide
  modified_base 2: mod_base = OTHER; note = uracil
  modified_base 4: mod_base = OTHER; note = uracil
  modified_base 14: mod_base = OTHER; note = uracil
  source 1..21: mol_type = other DNA
atctgcagaggcctccgcatt

SEQ ID NO: 589 - DNA, 21 bp, synthetic construct
  misc_feature 1..21: note = Description of Artificial Sequence: Synthetic oligonucleotide
  source 1..21: mol_type = other DNA
gagcagaaccttcagaatatt

SEQ ID NO: 590 - DNA, 21 bp, synthetic construct
  misc_feature 1..21: note = Description of Artificial Sequence: Synthetic oligonucleotide
  source 1..21: mol_type = other DNA
gagcagggcttcaccattgtt

SEQ ID NO: 591 - DNA, 21 bp, synthetic construct
  misc_feature 1..21: note = Description of Artificial Sequence: Synthetic oligonucleotide
  source 1..21: mol_type = other DNA
ggaaggagaagaattcgtatt

SEQ ID NO: 592 - DNA, 21 bp, synthetic construct
  misc_feature 1..21: note = Description of Artificial Sequence: Synthetic oligonucleotide
  source 1..21: mol_type = other DNA
gatatcatctttctctgaatt

SEQ ID NO: 593 - DNA, 19 bp, synthetic construct
  misc_feature 1..19: note = Description of Artificial Sequence: Synthetic oligonucleotide
  source 1..19: mol_type = other DNA
caactacggctttgccaat

SEQ ID NO: 594 - DNA, 19 bp, synthetic construct
  misc_feature 1..19: note = Description of Artificial Sequence: Synthetic oligonucleotide
  source 1..19: mol_type = other DNA
gcaactcacgctccggaaa

SEQ ID NO: 595 - DNA, 19 bp, synthetic construct
  misc_feature 1..19: note = Description of Artificial Sequence: Synthetic oligonucleotide
  source 1..19: mol_type = other DNA
gccctgagctggactactt

SEQ ID NO: 596 - DNA, 19 bp, synthetic construct
  misc_feature 1..19: note = Description of Artificial Sequence: Synthetic oligonucleotide
  source 1..19: mol_type = other DNA
ggtatgcgacgggaaagta

SEQ ID NO: 597 - DNA, 21 bp, synthetic construct
  misc_feature 1..21: note = Description of Artificial Sequence: Synthetic oligonucleotide
  source 1..21: mol_type = other DNA
aactcggaatccgaagttgga

SEQ ID NO: 598 - DNA, 21 bp, synthetic construct
  misc_feature 1..21: note = Description of Artificial Sequence: Synthetic oligonucleotide
  source 1..21: mol_type = other DNA
aaagacctgagggaccgggag

SEQ ID NO: 599 - DNA, 19 bp, synthetic construct
  misc_feature 1..19: note = Description of Artificial Sequence: Synthetic oligonucleotide
  source 1..19: mol_type = other DNA
gagaaaatgagctgtccgc

SEQ ID NO: 600 - DNA, 19 bp, synthetic construct
  misc_feature 1..19: note = Description of Artificial Sequence: Synthetic oligonucleotide
  source 1..19: mol_type = other DNA
ctggcagaagtagcagaac

SEQ ID NO: 601 - RNA, 21 nt, synthetic construct
  misc_feature 1..21: note = Description of Artificial Sequence: Synthetic oligonucleotide
  source 1..21: mol_type = other RNA
aaggctttggaacagaaacca

SEQ ID NO: 602 - RNA, 21 nt, synthetic construct
  misc_feature 1..21: note = Description of Artificial Sequence: Synthetic oligonucleotide
  source 1..21: mol_type = other RNA
aagagtcgggaccacagttta

SEQ ID NO: 603 - DNA, 21 bp, synthetic construct
  misc_feature 1..21: note = Description of Combined DNA/RNA Molecule: Synthetic oligonucleotide
  modified_base 7..8: mod_base = OTHER; note = uracil
  modified_base 14: mod_base = OTHER; note = uracil
  modified_base 18: mod_base = OTHER; note = uracil
  source 1..21: mol_type = other DNA
acagacttcggagtacctgtt

SEQ ID NO: 604 - DNA, 21 bp, synthetic construct
  misc_feature 1..21: note = Description of Combined DNA/RNA Molecule: Synthetic oligonucleotide
  modified_base 4: mod_base = OTHER; note = uracil
  modified_base 7: mod_base = OTHER; note = uracil
  modified_base 10: mod_base = OTHER; note = uracil
  modified_base 13..14: mod_base = OTHER; note = uracil
  source 1..21: mol_type = other DNA
cggtgctcatgcttacaactt

SEQ ID NO: 605 - DNA, 21 bp, synthetic construct
  misc_feature 1..21: note = Description of Combined DNA/RNA Molecule: Synthetic oligonucleotide
  modified_base 5..6: mod_base = OTHER; note = uracil
  modified_base 9: mod_base = OTHER; note = uracil
  modified_base 17..18: mod_base = OTHER; note = uracil
  source 1..21: mol_type = other DNA
cgagttgctagaccgcttctt

SEQ ID NO: 606 - RNA, 21 nt, synthetic construct
  misc_feature 1..21: note = Description of Artificial Sequence: Synthetic oligonucleotide
  source 1..21: mol_type = other RNA
aatgccggtgacacaacatga

SEQ ID NO: 607 - DNA, 20 bp, synthetic construct
  misc_feature 1..20: note = Description of Artificial Sequence: Synthetic oligonucleotide
  source 1..20: mol_type = other DNA
tacgggagcagatgatgaaa

SEQ ID NO: 608 - DNA, 21 bp, synthetic construct
  misc_feature 1..21: note = Description of Artificial Sequence: Synthetic oligonucleotide
  source 1..21: mol_type = other DNA
aacccaaatccatggaaaata

SEQ ID NO: 609 - DNA, 53 bp, synthetic construct
  misc_feature 1..53: note = Description of Artificial Sequence: Synthetic oligonucleotide
  source 1..53: mol_type = other DNA
gagcagtggaaggacagcattcaagagatgctgtccttccactgctctttttt

SEQ ID NO: 610 - DNA, 64 bp, synthetic construct
  misc_feature 1..64: note = Description of Artificial Sequence: Synthetic oligonucleotide
  source 1..64: mol_type = other DNA
gatcccgagcagtggaaggacagcattcaagagatgctgtccttccactgctcttttttggaaa

SEQ ID NO: 611 - DNA, 19 bp, synthetic construct
  misc_feature 1..19: note = Description of Artificial Sequence: Synthetic oligonucleotide
  source 1..19: mol_type = other DNA
ggaccaggcagagaatgag

SEQ ID NO: 612 - RNA, 21 nt, synthetic construct
  misc_feature 1..21: note = Description of Artificial Sequence: Synthetic oligonucleotide
  source 1..21: mol_type = other RNA
aagacacaggccaacgactac

SEQ ID NO: 613 - RNA, 21 nt, synthetic construct
  misc_feature 1..21: note = Description of Artificial Sequence: Synthetic oligonucleotide
  source 1..21: mol_type = other RNA
aagattgtgaagcagaaggcc

SEQ ID NO: 614 - DNA, 21 bp, synthetic construct
  misc_feature 1..21: note = Description of Artificial Sequence: Synthetic oligonucleotide
  source 1..21: mol_type = other DNA
aatctccttgcgccacagaat

SEQ ID NO: 615 - DNA, 21 bp, synthetic construct
  misc_feature 1..21: note = Description of Artificial Sequence: Synthetic oligonucleotide
  source 1..21: mol_type = other DNA
aagtcagctggatgaaccaag

SEQ ID NO: 616 - RNA, 21 nt, synthetic construct
  misc_feature 1..21: note = Description of Artificial Sequence: Synthetic oligonucleotide
  source 1..21: mol_type = other RNA
aagatccgacagagcgcctca

SEQ ID NO: 617 - DNA, 21 bp, synthetic construct
  misc_feature 1..21: note = Description of Artificial Sequence: Synthetic oligonucleotide
  source 1..21: mol_type = other DNA
aatgcaactgcagaagcagaa

SEQ ID NO: 618 - DNA, 21 bp, synthetic construct
  misc_feature 1..21: note = Description of Artificial Sequence: Synthetic oligonucleotide
  source 1..21: mol_type = other DNA
aagcaagtcgaggtagattgc

SEQ ID NO: 619 - RNA, 19 nt, synthetic construct
  misc_feature 1..19: note = Description of Artificial Sequence: Synthetic oligonucleotide
  source 1..19: mol_type = other RNA
cagctaactgcactccgag

SEQ ID NO: 620 - RNA, 19 nt, synthetic construct
  misc_feature 1..19: note = Description of Artificial Sequence: Synthetic oligonucleotide
  source 1..19: mol_type = other RNA
tgatattatggaagcaaat

SEQ ID NO: 621 - DNA, 21 bp, synthetic construct
  misc_feature 1..21: note = Description of Artificial Sequence: Synthetic oligonucleotide
  source 1..21: mol_type = other DNA
aaggcttttcccagtccttca

SEQ ID NO: 622 - DNA, 21 bp, synthetic construct
  misc_feature 1..21: note = Description of Artificial Sequence: Synthetic oligonucleotide
  source 1..21: mol_type = other DNA
aagatgatggtgtgccaagtg

SEQ ID NO: 623 - DNA, 21 bp, synthetic construct
  misc_feature 1..21: note = Description of Artificial Sequence: Synthetic oligonucleotide
  source 1..21: mol_type = other DNA
aatgttataggcatccgagac

SEQ ID NO: 624 - DNA, 21 bp, synthetic construct
  misc_feature 1..21: note = Description of Artificial Sequence: Synthetic oligonucleotide
  source 1..21: mol_type = other DNA
aacccaaacaagcgcatcaca

SEQ ID NO: 625 - DNA, 21 bp, synthetic construct
  misc_feature 1..21: note = Description of Artificial Sequence: Synthetic oligonucleotide
  source 1..21: mol_type = other DNA
aaagttcgagttgctatcaag

SEQ ID NO: 626 - DNA, 19 bp, synthetic construct
  misc_feature 1..19: note = Description of Artificial Sequence: Synthetic oligonucleotide
  source 1..19: mol_type = other DNA
gcgcatgaggaaccgcatt

SEQ ID NO: 627 - DNA, 19 bp, synthetic construct
  misc_feature 1..19: note = Description of Artificial Sequence: Synthetic oligonucleotide
  source 1..19: mol_type = other DNA
gaccaggagcgcatcaaag

SEQ ID NO: 628 - DNA, 19 bp, synthetic construct
  misc_feature 1..19: note = Description of Artificial Sequence: Synthetic oligonucleotide
  source 1..19: mol_type = other DNA
aagccagaacaccgagctg

SEQ ID NO: 629 - DNA, 19 bp, synthetic construct
  misc_feature 1..19: note = Description of Artificial Sequence: Synthetic oligonucleotide
  source 1..19: mol_type = other DNA
gcggagacagatcaacttg

SEQ ID NO: 630 - DNA, 19 bp, synthetic construct
  misc_feature 1..19: note = Description of Artificial Sequence: Synthetic oligonucleotide
  source 1..19: mol_type = other DNA
attggaggatgagaaatcg

SEQ ID NO: 631 - DNA, 19 bp, synthetic construct
  misc_feature 1..19: note = Description of Artificial Sequence: Synthetic oligonucleotide
  source 1..19: mol_type = other DNA
tcaacgccatcaccaccag

SEQ ID NO: 632 - RNA, 21 nt, synthetic construct
  misc_feature 1..21: note = Description of Artificial Sequence: Synthetic oligonucleotide
  source 1..21: mol_type = other RNA
aacgatgaagccctggagtgc

SEQ ID NO: 633 - DNA, 23 bp, synthetic construct
  misc_feature 1..23: note = Description of Artificial Sequence: Synthetic oligonucleotide
  source 1..23: mol_type = other DNA
acttcatcagaatggcagggttt

SEQ ID NO: 634 - DNA, 21 bp, synthetic construct
  misc_feature 1..21: note = Description of Artificial Sequence: Synthetic oligonucleotide
  source 1..21: mol_type = other DNA
aaccggaggtcaggtcgaaat

SEQ ID NO: 635 - DNA, 21 bp, synthetic construct
  misc_feature 1..21: note = Description of Artificial Sequence: Synthetic oligonucleotide
  source 1..21: mol_type = other DNA
aagcagagtgacctggtagat

SEQ ID NO: 636 - DNA, 21 bp, synthetic construct
  misc_feature 1..21: note = Description of Combined DNA/RNA Molecule: Synthetic oligonucleotide
  modified_base 9..10: mod_base = OTHER; note = uracil
  source 1..21: mol_type = other DNA
caccaccattgaggacgaatt

SEQ ID NO: 637 - DNA, 21 bp, synthetic construct
  misc_feature 1..21: note = Description of Combined DNA/RNA Molecule: Synthetic oligonucleotide
  modified_base 2: mod_base = OTHER; note = uracil
  modified_base 10..11: mod_base = OTHER; note = uracil
  modified_base 14: mod_base = OTHER; note = uracil
  modified_base 17: mod_base = OTHER; note = uracil
  source 1..21: mol_type = other DNA
gtgaccaccttactactcatt

SEQ ID NO: 638 - DNA, 21 bp, synthetic construct
  misc_feature 1..21: note = Description of Combined DNA/RNA Molecule: Synthetic oligonucleotide
  modified_base 2..4: mod_base = OTHER; note = uracil
  modified_base 13: mod_base = OTHER; note = uracil
  source 1..21: mol_type = other DNA
gtttgccaggagtgacgaatt

SEQ ID NO: 639 - DNA, 21 bp, synthetic construct
  misc_feature 1..21: note = Description of Combined DNA/RNA Molecule: Synthetic oligonucleotide
  modified_base 4..7: mod_base = OTHER; note = uracil
  modified_base 10: mod_base = OTHER; note = uracil
  modified_base 12: mod_base = OTHER; note = uracil
  modified_base 14: mod_base = OTHER; note = uracil
  modified_base 19: mod_base = OTHER; note = uracil
  source 1..21: mol_type = other DNA
ggcttttcatgtatcagcttt

SEQ ID NO: 640 - DNA, 21 bp, synthetic construct
  misc_feature 1..21: note = Description of Combined DNA/RNA Molecule: Synthetic oligonucleotide
  modified_base 6: mod_base = OTHER; note = uracil
  modified_base 10..11: mod_base = OTHER; note = uracil
  modified_base 14..19: mod_base = OTHER; note = uracil
  source 1..21: mol_type = other DNA
ggcaatggcttggtttttttt

SEQ ID NO: 641 - DNA, 21 bp, synthetic construct
  misc_feature 1..21: note = Description of Combined DNA/RNA Molecule: Synthetic oligonucleotide
  modified_base 5: mod_base = OTHER; note = uracil
  modified_base 9: mod_base = OTHER; note = uracil
  source 1..21: mol_type = other DNA
ggagtacatggagacagactt

SEQ ID NO: 642 - DNA, 19 bp, synthetic construct
  misc_feature 1..19: note = Description of Artificial Sequence: Synthetic oligonucleotide
  source 1..19: mol_type = other DNA
gtcgagacatcttgactga

SEQ ID NO: 643 - DNA, 19 bp, synthetic construct
  misc_feature 1..19: note = Description of Artificial Sequence: Synthetic oligonucleotide
  source 1..19: mol_type = other DNA
gacacggatctgagaatct

SEQ ID NO: 644 - RNA, 19 nt, synthetic construct
  misc_feature 1..19: note = Description of Artificial Sequence: Synthetic oligonucleotide
  source 1..19: mol_type = other RNA
ggacgtggttgaggaattc

SEQ ID NO: 645 - DNA, 21 bp, synthetic construct
  misc_feature 1..21: note = Description of Artificial Sequence: Synthetic oligonucleotide
  source 1..21: mol_type = other DNA
tagcagcacatcagtcgaata

SEQ ID NO: 646 - DNA, 21 bp, synthetic construct
  misc_feature 1..21: note = Description of Artificial Sequence: Synthetic oligonucleotide
  source 1..21: mol_type = other DNA
cccaatattgtcaattattta

SEQ ID NO: 647 - DNA, 19 bp, synthetic construct
  misc_feature 1..19: note = Description of Artificial Sequence: Synthetic oligonucleotide
  source 1..19: mol_type = other DNA
cacaaagctggtgtgtgca

SEQ ID NO: 648 - DNA, 21 bp, synthetic construct
  misc_feature 1..21: note = Description of Artificial Sequence: Synthetic oligonucleotide
  source 1..21: mol_type = other DNA
aaccggaggtcaggtcgaaat

SEQ ID NO: 649 - DNA, 21 bp, synthetic construct
  misc_feature 1..21: note = Description of Artificial Sequence: Synthetic oligonucleotide
  source 1..21: mol_type = other DNA
aagcagagtgacctggtagat

SEQ ID NO: 650 - DNA, 21 bp, synthetic construct
  misc_feature 1..21: note = Description of Artificial Sequence: Synthetic oligonucleotide
  source 1..21: mol_type = other DNA
aagccgtcctgtgtgccgctg

SEQ ID NO: 651 - DNA, 21 bp, synthetic construct
  misc_feature 1..21: note = Description of Artificial Sequence: Synthetic oligonucleotide
  source 1..21: mol_type = other DNA
aacgatgaagccctggagtgc

SEQ ID NO: 652 - DNA, 21 bp, synthetic construct
  misc_feature 1..21: note = Description of Artificial Sequence: Synthetic oligonucleotide
  source 1..21: mol_type = other DNA
aagttaaaagtgcctgaactg

SEQ ID NO: 653 - DNA, 21 bp, synthetic construct
  misc_feature 1..21: note = Description of Artificial Sequence: Synthetic oligonucleotide
  source 1..21: mol_type = other DNA
aagcaggccagactctctttc

SEQ ID NO: 654 - DNA, 21 bp, synthetic construct
  misc_feature 1..21: note = Description of Artificial Sequence: Synthetic oligonucleotide
  source 1..21: mol_type = other DNA
aagctcagcacacagaaagac

SEQ ID NO: 655 - DNA, 21 bp, synthetic construct
  misc_feature 1..21: note = Description of Artificial Sequence: Synthetic oligonucleotide
  source 1..21: mol_type = other DNA
aatgcggcggtggtgacagta

SEQ ID NO: 656 - DNA, 47 bp, synthetic construct
  misc_feature 1..47: note = Description of Artificial Sequence: Synthetic oligonucleotide
  source 1..47: mol_type = other DNA
gggacatagccaagctggtcgagtactggaccagcttggctatgtcc

SEQ ID NO: 657 - DNA, 21 bp, synthetic construct
  misc_feature 1..21: note = Description of Artificial Sequence: Synthetic oligonucleotide
  source 1..21: mol_type = other DNA
aactacggttgctggagacag

SEQ ID NO: 658 - DNA, 19 bp, synthetic construct
  misc_feature 1..19: note = Description of Artificial Sequence: Synthetic oligonucleotide
  source 1..19: mol_type = other DNA
caacaaccacaaccataac

SEQ ID NO: 659 - DNA, 21 bp, synthetic construct
  misc_feature 1..21: note = Description of Artificial Sequence: Synthetic oligonucleotide
  source 1..21: mol_type = other DNA
cataaccacaaccaccacttt

SEQ ID NO: 660 - DNA, 19 bp, synthetic construct
  misc_feature 1..19: note = Description of Artificial Sequence: Synthetic oligonucleotide
  source 1..19: mol_type = other DNA
tgtgagctcacatcttgat

SEQ ID NO: 661 - DNA, 19 bp, synthetic construct
  misc_feature 1..19: note = Description of Artificial Sequence: Synthetic oligonucleotide
  source 1..19: mol_type = other DNA
ccaggagtttgacacaatg

SEQ ID NO: 662 - DNA, 19 bp, synthetic construct
  misc_feature 1..19: note = Description of Artificial Sequence: Synthetic oligonucleotide
  source 1..19: mol_type = other DNA
gatcaatggctacacagga

SEQ ID NO: 663 - DNA, 19 bp, synthetic construct
  misc_feature 1..19: note = Description of Artificial Sequence: Synthetic oligonucleotide
  source 1..19: mol_type = other DNA
gagccaagaacaaaattgc

SEQ ID NO: 664 - DNA, 19 bp, synthetic construct
  misc_feature 1..19: note = Description of Artificial Sequence: Synthetic oligonucleotide
  source 1..19: mol_type = other DNA
gaaagtgcgccgtgccatc

SEQ ID NO: 665 - DNA, 21 bp, synthetic construct
  misc_feature 1..21: note = Description of Combined DNA/RNA Molecule: Synthetic oligonucleotide
  modified_base 5: mod_base = OTHER; note = uracil
  modified_base 7: mod_base = OTHER; note = uracil
  modified_base 12..13: mod_base = OTHER; note = uracil
  modified_base 17: mod_base = OTHER; note = uracil
  source 1..21: mol_type = other DNA
ccactgtggcattgaatcatt

SEQ ID NO: 666 - DNA, 21 bp, synthetic construct
  misc_feature 1..21: note = Description of Artificial Sequence: Synthetic oligonucleotide
  source 1..21: mol_type = other DNA
aacgccacctcgtttgttttc

SEQ ID NO: 667 - DNA, 20 bp, synthetic construct
  misc_feature 1..20: note = Description of Combined DNA/RNA Molecule: Synthetic oligonucleotide
  modified_base 3: mod_base = OTHER; note = uracil
  modified_base 5: mod_base = OTHER; note = uracil
  modified_base 12: mod_base = OTHER; note = uracil
  modified_base 14: mod_base = OTHER; note = uracil
  modified_base 16: mod_base = OTHER; note = uracil
  modified_base 18: mod_base = OTHER; note = uracil
  source 1..20: mol_type = other DNA
gatgtggacagtgtctgttt

SEQ ID NO: 668 - DNA, 21 bp, synthetic construct
  misc_feature 1..21: note = Description of Combined DNA/RNA Molecule: Synthetic oligonucleotide
  modified_base 2: mod_base = OTHER; note = uracil
  modified_base 8: mod_base = OTHER; note = uracil
  modified_base 14: mod_base = OTHER; note = uracil
  source 1..21: mol_type = other DNA
atgcagctggagatggcactt

SEQ ID NO: 669 - DNA, 19 bp, synthetic construct
  misc_feature 1..19: note = Description of Artificial Sequence: Synthetic oligonucleotide
  source 1..19: mol_type = other DNA
cgtggatgaggttgagaca

SEQ ID NO: 670 - DNA, 19 bp, synthetic construct
  misc_feature 1..19: note = Description of Artificial Sequence: Synthetic oligonucleotide
  source 1..19: mol_type = other DNA
ggtggacaacaacttcaca

SEQ ID NO: 671 - DNA, 19 bp, synthetic construct
  misc_feature 1..19: note = Description of Artificial Sequence: Synthetic oligonucleotide
  source 1..19: mol_type = other DNA
gaaggtggagaaccatatc

SEQ ID NO: 672 - DNA, 19 bp, synthetic construct
  misc_feature 1..19: note = Description of Artificial Sequence: Synthetic oligonucleotide
  source 1..19: mol_type = other DNA
gcacttgaactactggtat

SEQ ID NO: 673 - DNA, 21 bp, synthetic construct
  misc_feature 1..21: note = Description of Artificial Sequence: Synthetic oligonucleotide
  source 1..21: mol_type = other DNA
aagctgagcaagattcagacc

SEQ ID NO: 674 - DNA, 21 bp, synthetic construct
  misc_feature 1..21: note = Description of Artificial Sequence: Synthetic oligonucleotide
  source 1..21: mol_type = other DNA
aggtacatcgacttcctgtac

SEQ ID NO: 675 - DNA, 21 bp, synthetic construct
  misc_feature 1..21: note = Description of Artificial Sequence: Synthetic oligonucleotide
  source 1..21: mol_type = other DNA
agcgggtcatggctaacgtgc

SEQ ID NO: 676 - RNA, 22 nt, synthetic construct
  misc_feature 1..22: note = Description of Artificial Sequence: Synthetic oligonucleotide
  source 1..22: mol_type = other RNA
gggagcagaagcaggtgcagat

SEQ ID NO: 677 - DNA, 21 bp, synthetic construct
  misc_feature 1..21: note = Description of Artificial Sequence: Synthetic oligonucleotide
  source 1..21: mol_type = other DNA
gcccattgaaaccaagaaatt

SEQ ID NO: 678 - DNA, 52 bp, synthetic construct
  misc_feature 1..52: note = Description of Artificial Sequence: Synthetic oligonucleotide
  source 1..52: mol_type = other DNA
agacgcagaggccttggttcaagagaccaaggcctctgcgtctgactttttc

SEQ ID NO: 679 - DNA, 22 bp, synthetic construct
  misc_feature 1..22: note = Description of Combined DNA/RNA Molecule: Synthetic oligonucleotide
  modified_base 12: mod_base = OTHER; note = uracil
  source 1..22: mol_type = other DNA
gaagcacagagtgaagaccatt

SEQ ID NO: 680 - DNA, 21 bp, synthetic construct
  misc_feature 1..21: note = Description of Artificial Sequence: Synthetic oligonucleotide
  source 1..21: mol_type = other DNA
cgagcaggagaacagcgagtt

SEQ ID NO: 681 - DNA, 19 bp, synthetic construct
  misc_feature 1..19: note = Description of Artificial Sequence: Synthetic oligonucleotide
  source 1..19: mol_type = other DNA
gatggttatccaggtggca

SEQ ID NO: 682 - DNA, 21 bp, synthetic construct
  misc_feature 1..21: note = Description of Combined DNA/RNA Molecule: Synthetic oligonucleotide
  modified_base 2: mod_base = OTHER; note = uracil
  modified_base 4..5: mod_base = OTHER; note = uracil
  modified_base 7: mod_base = OTHER; note = uracil
  modified_base 10..11: mod_base = OTHER; note = uracil
  modified_base 16: mod_base = OTHER; note = uracil
  modified_base 19: mod_base = OTHER; note = uracil
  source 1..21: mol_type = other DNA
ctgttgtggttaaactccttt

SEQ ID NO: 683 - DNA, 21 bp, synthetic construct
  misc_feature 1..21: note = Description of Artificial Sequence: Synthetic oligonucleotide
  source 1..21: mol_type = other DNA
gccttgacaacgttaggaatc

SEQ ID NO: 684 - DNA, 21 bp, synthetic construct
  misc_feature 1..21: note = Description of Artificial Sequence: Synthetic oligonucleotide
  source 1..21: mol_type = other DNA
gcaggaagttcccaccttgac

SEQ ID NO: 685 - DNA, 18 bp, synthetic construct
  misc_feature 1..18: note = Description of Artificial Sequence: Synthetic oligonucleotide
  source 1..18: mol_type = other DNA
gcctgatgaagaagttcc

SEQ ID NO: 686 - DNA, 19 bp, synthetic construct
  misc_feature 1..19: note = Description of Artificial Sequence: Synthetic oligonucleotide
  source 1..19: mol_type = other DNA
gctagaaaaagctgagatc

SEQ ID NO: 687 - DNA, 21 bp, synthetic construct
  misc_feature 1..21: note = Description of Combined DNA/RNA Molecule: Synthetic oligonucleotide
  modified_base 3: mod_base = OTHER; note = uracil
  modified_base 6: mod_base = OTHER; note = uracil
  modified_base 16..18: mod_base = OTHER; note = uracil
  source 1..21: mol_type = other DNA
catcctaaggcccgatttctt

SEQ ID NO: 688 - DNA, 21 bp, synthetic construct
  misc_feature 1..21: note = Description of Combined DNA/RNA Molecule: Synthetic oligonucleotide
  modified_base 2..3: mod_base = OTHER; note = uracil
  modified_base 19: mod_base = OTHER; note = uracil
  source 1..21: mol_type = other DNA
gttcccggaacacaacccttt

SEQ ID NO: 689 - DNA, 21 bp, synthetic construct
  misc_feature 1..21: note = Description of Combined DNA/RNA Molecule: Synthetic oligonucleotide
  modified_base 6..7: mod_base = OTHER; note = uracil
  modified_base 13: mod_base = OTHER; note = uracil
  modified_base 18: mod_base = OTHER; note = uracil
  source 1..21: mol_type = other DNA
gcagcttcaggatgagatgtt

SEQ ID NO: 690 - DNA, 21 bp, synthetic construct
  misc_feature 1..21: note = Description of Combined DNA/RNA Molecule: Synthetic oligonucleotide
  modified_base 4..7: mod_base = OTHER; note = uracil
  modified_base 11: mod_base = OTHER; note = uracil
  modified_base 13..14: mod_base = OTHER; note = uracil
  source 1..21: mol_type = other DNA
cagttttgagtattcggggtt

SEQ ID NO: 691 - DNA, 20 bp, synthetic construct
  misc_feature 1..20: note = Description of Combined DNA/RNA Molecule: Synthetic oligonucleotide
  modified_base 3: mod_base = OTHER; note = uracil
  modified_base 8: mod_base = OTHER; note = uracil
  modified_base 13..14: mod_base = OTHER; note = uracil
  source 1..20: mol_type = other DNA
gatcacctgcacttcgagtt

SEQ ID NO: 692 - DNA, 21 bp, synthetic construct
  misc_feature 1..21: note = Description of Combined DNA/RNA Molecule: Synthetic oligonucleotide
  modified_base 2: mod_base = OTHER; note = uracil
  modified_base 9: mod_base = OTHER; note = uracil
  modified_base 14..17: mod_base = OTHER; note = uracil
  source 1..21: mol_type = other DNA
ctgaacagtgcccttttcctt

SEQ ID NO: 693 - DNA, 19 bp, synthetic construct
  misc_feature 1..19: note = Description of Artificial Sequence: Synthetic oligonucleotide
  source 1..19: mol_type = other DNA
ttatgagaagtctgacaag

SEQ ID NO: 694 - DNA, 19 bp, synthetic construct
  misc_feature 1..19: note = Description of Artificial Sequence: Synthetic oligonucleotide
  source 1..19: mol_type = other DNA
gattcttggctaaatccca

SEQ ID NO: 695 - DNA, 19 bp, synthetic construct
  misc_feature 1..19: note = Description of Artificial Sequence: Synthetic oligonucleotide
  source 1..19: mol_type = other DNA
ggacatttgaacaacagca

SEQ ID NO: 696 - DNA, 24 bp, synthetic construct
  misc_feature 1..24: note = Description of Artificial Sequence: Synthetic oligonucleotide
  source 1..24: mol_type = other DNA
aatttatggagtcaaccacagctt

SEQ ID NO: 697 - DNA, 21 bp, synthetic construct
  misc_feature 1..21: note = Description of Combined DNA/RNA Molecule: Synthetic oligonucleotide
  modified_base 6..9: mod_base = OTHER; note = uracil
  modified_base 13: mod_base = OTHER; note = uracil
  modified_base 16: mod_base = OTHER; note = uracil
  modified_base 18: mod_base = OTHER; note = uracil
  source 1..21: mol_type = other DNA
gccggttttccatactctctt

SEQ ID NO: 698 - DNA, 21 bp, synthetic construct
  misc_feature 1..21: note = Description of Combined DNA/RNA Molecule: Synthetic oligonucleotide
  modified_base 9: mod_base = OTHER; note = uracil
  source 1..21: mol_type = other DNA
caagaagatgcgccgcaactt

SEQ ID NO: 699 - DNA, 21 bp, synthetic construct
  misc_feature 1..21: note = Description of Combined DNA/RNA Molecule: Synthetic oligonucleotide
  modified_base 1: mod_base = OTHER; note = uracil
  modified_base 4: mod_base = OTHER; note = uracil
  modified_base 7: mod_base = OTHER; note = uracil
  modified_base 14: mod_base = OTHER; note = uracil
  source 1..21: mol_type = other DNA
tggtggtcacagataccagtt

SEQ ID NO: 700 - RNA, 21 nt, synthetic construct
  misc_feature 1..21: note = Description of Artificial Sequence: Synthetic oligonucleotide
  source 1..21: mol_type = other RNA
gtctggtaagactggagtacc

SEQ ID NO: 701 - RNA, 21 nt, synthetic construct
  misc_feature 1..21: note = Description of Artificial Sequence: Synthetic oligonucleotide
  source 1..21: mol_type = other RNA
ttggagatgaactggacaatt

SEQ ID NO: 702 - RNA, 21 nt, synthetic construct
  misc_feature 1..21: note = Description of Artificial Sequence: Synthetic oligonucleotide
  source 1..21: mol_type = other RNA
ctggacaataatatggagctt

SEQ ID NO: 703 - RNA, 21 nt, synthetic construct
  misc_feature 1..21: note = Description of Artificial Sequence: Synthetic oligonucleotide
  source 1..21: mol_type = other RNA
agaactttgtgctttaatgtt

SEQ ID NO: 704 - RNA, 21 nt, synthetic construct
  misc_feature 1..21: note = Description of Artificial Sequence: Synthetic oligonucleotide
  source 1..21: mol_type = other RNA
tataggcatatactggatgtt

SEQ ID NO: 705 - RNA, 21 nt, synthetic construct
  misc_feature 1..21: note = Description of Artificial Sequence: Synthetic oligonucleotide
  source 1..21: mol_type = other RNA
agtgaaaaccttgaaagcgtt

SEQ ID NO: 706 - RNA, 21 nt, synthetic construct
  misc_feature 1..21: note = Description of Artificial Sequence: Synthetic oligonucleotide
  source 1..21: mol_type = other RNA
agtcatgaaccacgttaactt

SEQ ID NO: 707 - DNA, 21 bp, synthetic construct
  misc_feature 1..21: note = Description of Artificial Sequence: Synthetic oligonucleotide
  source 1..21: mol_type = other DNA
aatgagaacagcaacaactcc

SEQ ID NO: 708 - DNA, 21 bp, synthetic construct
  misc_feature 1..21: note = Description of Artificial Sequence: Synthetic oligonucleotide
  source 1..21: mol_type = other DNA
aagttctcagacaatgactgc

SEQ ID NO: 709 - DNA, 60 bp, synthetic construct
  misc_feature 1..60: note = Description of Artificial Sequence: Synthetic oligonucleotide
  source 1..60: mol_type = other DNA
tcgagacagtagtggttctacgtgccgagtactgggcacgtagaaccactactgtttttt

SEQ ID NO: 710 - RNA, 21 nt, synthetic construct
  misc_feature 1..21: note = Description of Artificial Sequence: Synthetic oligonucleotide
  source 1..21: mol_type = other RNA
agatgacaggtgcccagagtt

SEQ ID NO: 711 - DNA, 21 bp, synthetic construct
  misc_feature 1..21: note = Description of Combined DNA/RNA Molecule: Synthetic oligonucleotide
  modified_base 3: mod_base = OTHER; note = uracil
  modified_base 7: mod_base = OTHER; note = uracil
  source 1..21: mol_type = other DNA
ggtagatcaaagcaggaggtt

SEQ ID NO: 712 - DNA, 23 bp, synthetic construct
  misc_feature 1..23: note = Description of Combined DNA/RNA Molecule: Synthetic oligonucleotide
  modified_base 8: mod_base = OTHER; note = uracil
  modified_base 12: mod_base = OTHER; note = uracil
  modified_base 15: mod_base = OTHER; note = uracil
  modified_base 19..21: mod_base = OTHER; note = uracil
  source 1..23: mol_type = other DNA
aacggagtccctgctgcattttt

SEQ ID NO: 713 - DNA, 23 bp, synthetic construct
  misc_feature 1..23: note = Description of Combined DNA/RNA Molecule: Synthetic oligonucleotide
  modified_base 6: mod_base = OTHER; note = uracil
  modified_base 8: mod_base = OTHER; note = uracil
  modified_base 15: mod_base = OTHER; note = uracil
  modified_base 20..21: mod_base = OTHER; note = uracil
  source 1..23: mol_type = other DNA
aaccatgtcaccagtccagtttt

SEQ ID NO: 714 - DNA, 23 bp, synthetic construct
  misc_feature 1..23: note = Description of Combined DNA/RNA Molecule: Synthetic oligonucleotide
  modified_base 6: mod_base = OTHER; note = uracil
  modified_base 8: mod_base = OTHER; note = uracil
  modified_base 10..12: mod_base = OTHER; note = uracil
  modified_base 16..18: mod_base = OTHER; note = uracil
  source 1..23: mol_type = other DNA
aagcctgtgtttggctttggatt

SEQ ID NO: 715 - DNA, 23 bp, synthetic construct
  misc_feature 1..23: note = Description of Artificial Sequence: Synthetic oligonucleotide
  source 1..23: mol_type = other DNA
aaccattatggaagaagtacatt

SEQ ID NO: 716 - DNA, 21 bp, synthetic construct
  misc_feature 1..21: note = Description of Combined DNA/RNA Molecule: Synthetic oligonucleotide
  modified_base 4..5: mod_base = OTHER; note = uracil
  modified_base 7..8: mod_base = OTHER; note = uracil
  modified_base 10: mod_base = OTHER; note = uracil
  modified_base 16: mod_base = OTHER; note = uracil
  modified_base 18..19: mod_base = OTHER; note = uracil
  source 1..21: mol_type = other DNA
gggttattctgaacatgtttt

SEQ ID NO: 717 - DNA, 21 bp, synthetic construct
  misc_feature 1..21: note = Description of Artificial Sequence: Synthetic oligonucleotide
  source 1..21: mol_type = other DNA
gcaactggatttctgtgaagg

SEQ ID NO: 718 - DNA, 21 bp, synthetic construct
  misc_feature 1..21: note = Description of Artificial Sequence: Synthetic oligonucleotide
  source 1..21: mol_type = other DNA
gaagcggatttcttccttctg

SEQ ID NO: 719 - DNA, 21 bp, synthetic construct
  misc_feature 1..21: note = Description of Artificial Sequence: Synthetic oligonucleotide
  source 1..21: mol_type = other DNA
aaggagatcgacctggtcaac

SEQ ID NO: 720 - DNA, 21 bp, synthetic construct
  misc_feature 1..21: note = Description of Artificial Sequence: Synthetic oligonucleotide
  source 1..21: mol_type = other DNA
aagggacacacagttttgacg

SEQ ID NO: 721 - DNA, 54 bp, synthetic construct
  misc_feature 1..54: note = Description of Artificial Sequence: Synthetic oligonucleotide
  source 1..54: mol_type = other DNA
gaactacacaaattcagccaggcgtatcatccggtgtttcgtcctttccacaag

SEQ ID NO: 722 - DNA, 29 bp, synthetic construct
  misc_feature 1..29: note = Description of Artificial Sequence: Synthetic oligonucleotide
  source 1..29: mol_type = other DNA
aaaaggcaaattcacaaacagcctgtctc

SEQ ID NO: 723 - DNA, 29 bp, synthetic construct
  misc_feature 1..29: note = Description of Artificial Sequence: Synthetic oligonucleotide
  source 1..29: mol_type = other DNA
aagttctccgaagtgtgagaacctgtctc

SEQ ID NO: 724 - DNA, 21 bp, synthetic construct
  misc_feature 1..21: note = Description of Artificial Sequence: Synthetic oligonucleotide
  source 1..21: mol_type = other DNA
aagctgacactgatctctgaa

SEQ ID NO: 725 - DNA, 19 bp, synthetic construct
  misc_feature 1..19: note = Description of Artificial Sequence: Synthetic oligonucleotide
  source 1..19: mol_type = other DNA
ccaggagtttgacacaatg

SEQ ID NO: 726 - DNA, 21 bp, synthetic construct
  misc_feature 1..21: note = Description of Combined DNA/RNA Molecule: Synthetic oligonucleotide
  modified_base 8: mod_base = OTHER; note = uracil
  modified_base 10..11: mod_base = OTHER; note = uracil
  modified_base 14..15: mod_base = OTHER; note = uracil
  source 1..21: mol_type = other DNA
ggacagatgttccttaagatt

SEQ ID NO: 727 - DNA, 21 bp, synthetic construct
  misc_feature 1..21: note = Description of Artificial Sequence: Synthetic oligonucleotide
  source 1..21: mol_type = other DNA
ggccaagggagggggagcgta

SEQ ID NO: 728 - DNA, 21 bp, synthetic construct
  misc_feature 1..21: note = Description of Artificial Sequence: Synthetic oligonucleotide
  source 1..21: mol_type = other DNA
ggcgctggagtcaagtgtctc

SEQ ID NO: 729 - DNA, 21 bp, synthetic construct
  misc_feature 1..21: note = Description of Combined DNA/RNA Molecule: Synthetic oligonucleotide
  modified_base 2: mod_base = OTHER; note = uracil
  modified_base 8: mod_base = OTHER; note = uracil
  modified_base 14: mod_base = OTHER; note = uracil
  source 1..21: mol_type = other DNA
atgcagctggagatggcactt

SEQ ID NO: 730 - DNA, 23 bp, synthetic construct
  misc_feature 1..23: note = Description of Combined DNA/RNA Molecule: Synthetic oligonucleotide
  modified_base 3: mod_base = OTHER; note = uracil
  modified_base 18: mod_base = OTHER; note = uracil
  source 1..23: mol_type = other DNA
aatacaccgacaagcaatgactt

SEQ ID NO: 731 - DNA, 23 bp, synthetic construct
  misc_feature 1..23: note = Description of Combined DNA/RNA Molecule: Synthetic oligonucleotide
  modified_base 5: mod_base = OTHER; note = uracil
  modified_base 9..10: mod_base = OTHER; note = uracil
  modified_base 19: mod_base = OTHER; note = uracil
  modified_base 21: mod_base = OTHER; note = uracil
  source 1..23: mol_type = other DNA
aaagtcggttaacagcgatcttt

SEQ ID NO: 732 - DNA, 19 bp, synthetic construct
  misc_feature 1..19: note = Description of Artificial Sequence: Synthetic oligonucleotide
  source 1..19: mol_type = other DNA
cctttcatttctcctcctt

SEQ ID NO: 733 - DNA, 19 bp, synthetic construct
  misc_feature 1..19: note = Description of Artificial Sequence: Synthetic oligonucleotide
  source 1..19: mol_type = other DNA
agctgctcctgtggctctg

SEQ ID NO: 734 - DNA, 19 bp, synthetic construct
  misc_feature 1..19: note = Description of Artificial Sequence: Synthetic oligonucleotide
  source 1..19: mol_type = other DNA
gcctcctgcccagaaggca

SEQ ID NO: 735 - RNA, 18 nt, synthetic construct
  misc_feature 1..18: note = Description of Artificial Sequence: Synthetic oligonucleotide
  source 1..18: mol_type = other RNA
tgagagaaagcacagaaa

SEQ ID NO: 736 - RNA, 19 nt, synthetic construct
  misc_feature 1..19: note = Description of Artificial Sequence: Synthetic oligonucleotide
  source 1..19: mol_type = other RNA
tggacatccccaaaattga

SEQ ID NO: 737 - RNA, 19 nt, synthetic construct
  misc_feature 1..19: note = Description of Artificial Sequence: Synthetic oligonucleotide
  source 1..19: mol_type = other RNA
ccccatcatctacaccaca

SEQ ID NO: 738 - protein, 4 aa, Homo sapiens
DEAD

SEQ ID NO: 739 - protein, 4 aa, Homo sapiens
YRPW

SEQ ID NO: 740 - DNA, 20 bp, synthetic construct
  misc_feature 1..20: note = Description of Artificial Sequence: Synthetic oligonucleotide
  source 1..20: mol_type = other DNA
atggaaggtccaacgttctc

SEQ ID NO: 741 - DNA, 20 bp, synthetic construct
  misc_feature 1..20: note = Description of Artificial Sequence: Synthetic oligonucleotide
  source 1..20: mol_type = other DNA
tccatgtcggtcctgctgat

SEQ ID NO: 742 - DNA, 20 bp, synthetic construct
  misc_feature 1..20: note = Description of Artificial Sequence: Synthetic oligonucleotide
  source 1..20: mol_type = other DNA
atggaaggtccagtgttctc

SEQ ID NO: 743 - DNA, 26 bp, synthetic construct
  misc_feature 1..26: note = Description of Artificial Sequence: Synthetic oligonucleotide
  source 1..26: mol_type = other DNA
ggggggtcaacgttgagggggggggg

SEQ ID NO: 744 - DNA, 26 bp, synthetic construct
  misc_feature 1..26: note = Description of Artificial Sequence: Synthetic oligonucleotide
  source 1..26: mol_type = other DNA
ggggggtcaagtctgagggggggggg

SEQ ID NO: 745 - DNA, 15 bp, synthetic construct
  misc_feature 1..15: note = Description of Artificial Sequence: Synthetic oligonucleotide
  source 1..15: mol_type = other DNA
gctagaccttagtgt

SEQ ID NO: 746 - DNA, 19 bp, synthetic construct
  misc_feature 1..19: note = Description of Artificial Sequence: Synthetic oligonucleotide
  source 1..19: mol_type = other DNA
ggggtcaacgttgacgggg

SEQ ID NO: 747 - DNA, 19 bp, synthetic construct
  misc_feature 1..19: note = Description of Artificial Sequence: Synthetic oligonucleotide
  source 1..19: mol_type = other DNA
ggggtcaagtctgacgggg

SEQ ID NO: 748 - DNA, 20 bp, synthetic construct
  misc_feature 1..20: note = Description of Artificial Sequence: Synthetic oligonucleotide
  source 1..20: mol_type = other DNA
tccatgtccttcctgatgct

SEQ ID NO: 749 - DNA, 20 bp, synthetic construct
  misc_feature 1..20: note = Description of Artificial Sequence: Synthetic oligonucleotide
  source 1..20: mol_type = other DNA
gagaacgctgcaccttccat

SEQ ID NO: 750 - DNA, 19 bp, synthetic construct
  misc_feature 1..19: note = Description of Artificial Sequence: Synthetic oligonucleotide
  source 1..19: mol_type = other DNA
ggggtcagtcttgacgggg

SEQ ID NO: 751 - DNA, 20 bp, synthetic construct
  misc_feature 1..20: note = Description of Artificial Sequence: Synthetic oligonucleotide
  source 1..20: mol_type = other DNA
tccaggacttctctcaagtt

SEQ ID NO: 752 - DNA, 23 bp, synthetic construct
  misc_feature 1..23: note = Description of Artificial Sequence: Synthetic oligonucleotide
  source 1..23: mol_type = other DNA
tcgtcgttttgtcgttttgtcgt

SEQ ID NO: 753 - DNA, 54 bp, synthetic construct
  misc_feature 1..54: note = Description of Artificial Sequence: Synthetic oligonucleotide
  source 1..54: mol_type = other DNA
gacttcgtgtcgttcttctgtcgtctttagcgcttctcctgcgtgcgtcccttg

SEQ ID NO: 754 - DNA, 20 bp, synthetic construct
  misc_feature 1..20: note = Description of Artificial Sequence: Synthetic oligonucleotide
  source 1..20: mol_type = other DNA
ggggtcaacgttgagggggg

SEQ ID NO: 755 - DNA, 20 bp, synthetic construct
  misc_feature 1..20: note = Description of Artificial Sequence: Synthetic oligonucleotide
  source 1..20: mol_type = other DNA
tccaggactttcctcaggtt

SEQ ID NO: 756 - DNA, 20 bp, synthetic construct
  misc_feature 1..20: note = Description of Artificial Sequence: Synthetic oligonucleotide
  source 1..20: mol_type = other DNA
cccccccccccccccccccc

SEQ ID NO: 757 - DNA, 20 bp, synthetic construct
  misc_feature 1..20: note = Description of Artificial Sequence: Synthetic oligonucleotide
  source 1..20: mol_type = other DNA
ggcggcggcggcggcggcgg

SEQ ID NO: 758 - DNA, 19 bp, synthetic construct
  misc_feature 1..19: note = Description of Artificial Sequence: Synthetic oligonucleotide
  source 1..19: mol_type = other DNA
gggtcaacgttgagggggg

SEQ ID NO: 759 - DNA, 20 bp, synthetic construct
  misc_feature 1..20: note = Description of Artificial Sequence: Synthetic oligonucleotide
  source 1..20: mol_type = other DNA
tctcccagcgtgcgccatat

SEQ ID NO: 760 - DNA, 21 bp, synthetic construct
  misc_feature 1..21: note = Description of Artificial Sequence: Synthetic oligonucleotide
  source 1..21: mol_type = other DNA
ggggtctgtgcttttgggggg

SEQ ID NO: 761 - DNA, 20 bp, synthetic construct
  misc_feature 1..20: note = Description of Artificial Sequence: Synthetic oligonucleotide
  source 1..20: mol_type = other DNA
tcaggggtggggggaacctt

SEQ ID NO: 762 - DNA, 20 bp, synthetic construct
  misc_feature 1..20: note = Description of Artificial Sequence: Synthetic oligonucleotide
  source 1..20: mol_type = other DNA
ggggttgacgttttgggggg

SEQ ID NO: 763 - DNA, 20 bp, synthetic construct
  misc_feature 1..20: note = Description of Artificial Sequence: Synthetic oligonucleotide
  source 1..20: mol_type = other DNA
tctagcgtttttagcgttcc

SEQ ID NO: 764 - DNA, 15 bp, synthetic construct
  misc_feature 1..15: note = Description of Artificial Sequence: Synthetic oligonucleotide
  source 1..15: mol_type = other DNA
gcgtttttttttgcg

SEQ ID NO: 765 - DNA, 20 bp, synthetic construct
  misc_feature 1..20: note = Description of Artificial Sequence: Synthetic oligonucleotide
  source 1..20: mol_type = other DNA
tccatgagcttcctgatgct

SEQ ID NO: 766 - DNA, 20 bp, synthetic construct
  misc_feature 1..20: note = Description of Artificial Sequence: Synthetic oligonucleotide
  source 1..20: mol_type = other DNA
tccatgtcgttcctgatgcg

SEQ ID NO: 767 - DNA, 20 bp, synthetic construct
  misc_feature 1..20: note = Description of Artificial Sequence: Synthetic oligonucleotide
  source 1..20: mol_type = other DNA
tccatgtcgttccgcgcgcg

SEQ ID NO: 768 - DNA, 20 bp, synthetic construct
  misc_feature 1..20: note = Description of Artificial Sequence: Synthetic oligonucleotide
  source 1..20: mol_type = other DNA
tccatgtcgttcctgccgct

SEQ ID NO: 769 - DNA, 20 bp, synthetic construct
  misc_feature 1..20: note = Description of Artificial Sequence: Synthetic oligonucleotide
  source 1..20: mol_type = other DNA
gcgcgcgcgcgcgcgcgcgc

SEQ ID NO: 770 - DNA, 20 bp, synthetic construct
  misc_feature 1..20: note = Description of Artificial Sequence: Synthetic oligonucleotide
  source 1..20: mol_type = other DNA
ccggccggccggccggccgg

SEQ ID NO: 771 - DNA, 20 bp, synthetic construct
  misc_feature 1..20: note = Description of Artificial Sequence: Synthetic oligonucleotide
  source 1..20: mol_type = other DNA
tccatgccgttcctgccgtt

SEQ ID NO: 772 - RNA, 80 nt, Homo sapiens
  source 1..80: mol_type = genomic RNA
tgggatgaggtagtaggttgtatagttttagggtcacacccaccactgggagataactatacaatctactgtctttccta

SEQ ID NO: 773 - RNA, 72 nt, Homo sapiens
  source 1..72: mol_type = genomic RNA
aggttgaggtagtaggttgtatagtttagaattacatcaagggagataactgtacagcctcctagctttcct

SEQ ID NO: 774 - RNA, 74 nt, Homo sapiens
  source 1..74: mol_type = genomic RNA
gggtgaggtagtaggttgtatagtttggggctctgccctgctatgggataactatacaatctactgtctttcct

SEQ ID NO: 775 - RNA, 83 nt, Homo sapiens
  source 1..83: mol_type = genomic RNA
cggggtgaggtagtaggttgtgtggtttcagggcagtgatgttgcccctcggaagataactatacaacctactgccttccctg

SEQ ID NO: 776 - RNA, 84 nt, Homo sapiens
  source 1..84: mol_type = genomic RNA
gcatccgggttgaggtagtaggttgtatggtttagagttacaccctgggagttaactgtacaaccttctagctttccttggagc

SEQ ID NO: 777 - RNA, 87 nt, Homo sapiens
  source 1..87: mol_type = genomic RNA
cctaggaagaggtagtaggttgcatagttttagggcagggattttgcccacaaggaggtaactatacgacctgctgcctttcttagg

SEQ ID NO: 778 - RNA, 79 nt, Homo sapiens
  source 1..79: mol_type = genomic RNA
cccgggctgaggtaggaggttgtatagttgaggaggacacccaaggagatcactatacggcctcctagctttccccagg

SEQ ID NO: 779 - RNA, 87 nt, Homo sapiens
  source 1..87: mol_type = genomic RNA
tcagagtgaggtagtagattgtatagttgtggggtagtgattttaccctgttcaggagataactatacaatctattgccttccctga

SEQ ID NO: 780 - RNA, 83 nt, Homo sapiens
  source 1..83: mol_type = genomic RNA
tgtgggatgaggtagtagattgtatagttttagggtcataccccatcttggagataactatacagtctactgtctttcccacg

SEQ ID NO: 781 - RNA, 84 nt, Homo sapiens
  source 1..84: mol_type = genomic RNA
aggctgaggtagtagtttgtacagtttgagggtctatgataccacccggtacaggagataactgtacaggccactgccttgcca

SEQ ID NO: 782 - RNA, 84 nt, Homo sapiens
  source 1..84: mol_type = genomic RNA
ctggctgaggtagtagtttgtgctgttggtcgggttgtgacattgcccgctgtggagataactgcgcaagctactgccttgcta

SEQ ID NO: 783 - RNA, 71 nt, Homo sapiens
  source 1..71: mol_type = genomic RNA
tgggaaacatacttctttatatgcccatatggacctgctaagctatggaatgtaaagaagtatgtatctca

SEQ ID NO: 784 - RNA, 85 nt, Homo sapiens
  source 1..85: mol_type = genomic RNA
acctactcagagtacatacttctttatgtacccatatgaacatacaatgctatggaatgtaaagaagtatgtatttttggtaggc

SEQ ID NO: 785 - RNA, 110 nt, Homo sapiens
  source 1..110: mol_type = genomic RNA
ttggatgttggcctagttctgtgtggaagactagtgattttgttgtttttagataactaaatcgacaacaaatcacagtctgccatatggcacaggccatgcctctacag

SEQ ID NO: 786 - RNA, 110 nt, Homo sapiens
  source 1..110: mol_type = genomic RNA
ctggatacagagtggaccggctggccccatctggaagactagtgattttgttgttgtcttactgcgctcaacaacaaatcccagtctacctaatggtgccagccatcgca

SEQ ID NO: 787 - RNA, 110 nt, Homo sapiens
  source 1..110: mol_type = genomic RNA
agattagagtggctgtggtctagtgctgtgtggaagactagtgattttgttgttctgatgtactacgacaacaagtcacagccggcctcatagcgcagactcccttcgac

SEQ ID NO: 788 - RNA, 89 nt, Homo sapiens
  source 1..89: mol_type = genomic RNA
cggggttggttgttatctttggttatctagctgtatgagtggtgtggagtcttcataaagctagataaccgaaagtaaaaataacccca

SEQ ID NO: 789 - RNA, 87 nt, Homo sapiens
  source 1..87: mol_type = genomic RNA
ggaagcgagttgttatctttggttatctagctgtatgagtgtattggtcttcataaagctagataaccgaaagtaaaaactccttca

SEQ ID NO: 790 - RNA, 90 nt, Homo sapiens
  source 1..90: mol_type = genomic RNA
ggaggcccgtttctctctttggttatctagctgtatgagtgccacagagccgtcataaagctagataaccgaaagtagaaatgattctca

SEQ ID NO: 791 - RNA, 110 nt, Homo sapiens
  source 1..110: mol_type = genomic RNA
gatctgtctgtcttctgtatataccctgtagatccgaatttgtgtaaggaattttgtggtcacaaattcgtatctaggggaatatgtagttgacataaacactccgctct

SEQ ID NO: 792 - RNA, 110 nt, Homo sapiens
  source 1..110: mol_type = genomic RNA
ccagaggttgtaacgttgtctatatataccctgtagaaccgaatttgtgtggtatccgtatagtcacagattcgattctaggggaatatatggtcgatgcaaaaacttca

SEQ ID NO: 793 - RNA, 83 nt, Homo sapiens
  source 1..83: mol_type = genomic RNA
ccttggagtaaagtagcagcacataatggtttgtggattttgaaaaggtgcaggccatattgtgctgcctcaaaaatacaagg

SEQ ID NO: 794 - RNA, 98 nt, Homo sapiens
  source 1..98: mol_type = genomic RNA
ttgaggccttaaagtactgtagcagcacatcatggtttacatgctacagtcaagatgcgaatcattatttgctgctctagaaatttaaggaaattcat

SEQ ID NO: 795 - RNA, 89 nt, Homo sapiens
  source 1..89: mol_type = genomic RNA
gtcagcagtgccttagcagcacgtaaatattggcgttaagattctaaaattatctccagtattaactgtgctgctgaagtaaggttgac

SEQ ID NO: 796 - RNA, 81 nt, Homo sapiens
  source 1..81: mol_type = genomic RNA
gttccactctagcagcacgtaaatattggcgtagtgaaatatatattaaacaccaatattactgtgctgctttagtgtgac

SEQ ID NO: 797 - RNA, 84 nt, Homo sapiens
  source 1..84: mol_type = genomic RNA
gtcagaataatgtcaaagtgcttacagtgcaggtagtgatatgtgcatctactgcagtgaaggcacttgtagcattatggtgac

SEQ ID NO: 798 - RNA, 71 nt, Homo sapiens
  source 1..71: mol_type = genomic RNA
tgttctaaggtgcatctagtgcagatagtgaagtagattagcatctactgccctaagtgctccttctggca

SEQ ID NO: 799 - RNA, 71 nt, Homo sapiens
  source 1..71: mol_type = genomic RNA
tgtgttaaggtgcatctagtgcagttagtgaagcagcttagaatctactgccctaaatgccccttctggca

SEQ ID NO: 800 - RNA, 82 nt, Homo sapiens
  source 1..82: mol_type = genomic RNA
gcagtcctctgttagttttgcatagttgcactacaagaagaatgtagttgtgcaaatctatgcaaaactgatggtggcctgc

SEQ ID NO: 801 - RNA, 87 nt, Homo sapiens
  source 1..87: mol_type = genomic RNA
cactgttctatggttagttttgcaggtttgcatccagctgtgtgatattctgctgtgcaaatccatgcaaaactgactgtggtagtg

SEQ ID NO: 802 - RNA, 96 nt, Homo sapiens
  source 1..96: mol_type = genomic RNA
acattgctacttacaattagttttgcaggtttgcatttcagcgtatatatgtatatgtggctgtgcaaatccatgcaaaactgattgtgataatgt

SEQ ID NO: 803 - RNA, 71 nt, Homo sapiens
  source 1..71: mol_type = genomic RNA
gtagcactaaagtgcttatagtgcaggtagtgtttagttatctactgcattatgagcacttaaagtactgc

SEQ ID NO: 804 - RNA, 69 nt, Homo sapiens
  source 1..69: mol_type = genomic RNA
agtaccaaagtgctcatagtgcaggtagttttggcatgactctactgtagtatgggcacttccagtact

SEQ ID NO: 805 - RNA, 72 nt, Homo sapiens
  source 1..72: mol_type = genomic RNA
tgtcgggtagcttatcagactgatgttgactgttgaatctcatggcaacaccagtcgatgggctgtctgaca

SEQ ID NO: 806 - RNA, 85 nt, Homo sapiens
  source 1..85: mol_type = genomic RNA
ggctgagccgcagtagttcttcagtggcaagctttatgtcctgacccagctaaagctgccagttgaagaactgttgccctctgcc

SEQ ID NO: 807 - RNA, 73 nt, Homo sapiens
  source 1..73: mol_type = genomic RNA
ggccggctggggttcctggggatgggatttgcttcctgtcacaaatcacattgccagggatttccaaccgacc

SEQ ID NO: 808 - RNA, 97 nt, Homo sapiens
  source 1..97: mol_type = genomic RNA
ctcaggtgctctggctgcttgggttcctggcatgctgatttgtgacttaagattaaaatcacattgccagggattaccacgcaaccacgaccttggc

SEQ ID NO: 809 - RNA, 100 nt, Homo sapiens
  source 1..100: mol_type = genomic RNA
agtgactttccaggtgtcacacagtgagtggcataatcagagtacaatttgagtcatgcccatacatcacattgccagtgattacccaaggaaagtgacg

SEQ ID NO: 810 - RNA, 68 nt, Homo sapiens
  source 1..68: mol_type = genomic RNA
ctccggtgcctactgagctgatatcagttctcattttacacactggctcagttcagcaggaacaggag

SEQ ID NO: 811 - RNA, 73 nt, Homo sapiens
  source 1..73: mol_type = genomic RNA
ctctgcctcccgtgcctactgagctgaaacacagttggtttgtgtacactggctcagttcagcaggaacaggg

SEQ ID NO: 812 - RNA, 84 nt, Homo sapiens
  source 1..84: mol_type = genomic RNA
ggccagtgttgagaggcggagacttgggcaattgctggacgctgccctgggcattgcacttgtctcggtctgacagtgccggcc

SEQ ID NO: 813 - RNA, 77 nt, Homo sapiens
  source 1..77: mol_type = genomic RNA
gtggcctcgttcaagtaatccaggataggctgtgcaggtcccaatgggcctattcttggttacttgcacggggacgc

SEQ ID NO: 814 - RNA, 84 nt, Homo sapiens
  source 1..84: mol_type = genomic RNA
ggctgtggctggattcaagtaatccaggataggctgtttccatctgtgaggcctattcttgattacttgtttctggaggcagct

SEQ ID NO: 815 - RNA, 77 nt, Homo sapiens
  source 1..77: mol_type = genomic RNA
ccgggacccagttcaagtaattcaggataggttgtgtgctgtccagcctgttctccattacttggctcggggaccgg

SEQ ID NO: 816 - RNA, 78 nt, Homo sapiens
  source 1..78: mol_type = genomic RNA
ctgaggagcagggcttagctgcttgtgagcagggtccacaccaagtcgtgttcacagtggctaagttccgccccccag

SEQ ID NO: 817 - RNA, 97 nt, Homo sapiens
  source 1..97: mol_type = genomic RNA
acctctctaacaaggtgcagagcttagctgattggtgaacagtgattggtttccgctttgttcacagtggctaagttctgcacctgaagagaaggtg

SEQ ID NO: 818 - RNA, 86 nt, Homo sapiens
  source 1..86: mol_type = genomic RNA
ggtccttgccctcaaggagctcacagtctattgagttacctttctgactttcccactagattgtgagctcctggagggcaggcact

SEQ ID NO: 819 - RNA, 64 nt, Homo sapiens
  source 1..64: mol_type = genomic RNA
atgactgatttcttttggtgttcagagtcaatataattttctagcaccatctgaaatcggttat

SEQ ID NO: 820 - RNA, 81 nt, Homo sapiens
  source 1..81: mol_type = genomic RNA
cttcaggaagctggtttcatatggtggtttagatttaaatagtgattgtctagcaccatttgaaatcagtgttcttggggg

SEQ ID NO: 821 - RNA, 81 nt, Homo sapiens
  source 1..81: mol_type = genomic RNA
cttctggaagctggtttcacatggtggcttagatttttccatctttgtatctagcaccatttgaaatcagtgttttaggag

SEQ ID NO: 822 - RNA, 88 nt, Homo sapiens
  source 1..88: mol_type = genomic RNA
atctcttacacaggctgaccgatttctcctggtgttcagagtctgtttttgtctagcaccatttgaaatcggttatgatgtaggggga

SEQ ID NO: 823 - RNA, 71 nt, Homo sapiens
  source 1..71: mol_type = genomic RNA
gcgactgtaaacatcctcgactggaagctgtgaagccacagatgggctttcagtcggatgtttgcagctgc

SEQ ID NO: 824 - RNA, 88 nt, Homo sapiens
  source 1..88: mol_type = genomic RNA
accaagtttcagttcatgtaaacatcctacactcagctgtaatacatggattggctgggaggtggatgtttacttcagctgacttgga

SEQ ID NO: 825 - RNA, 89 nt, Homo sapiens
  source 1..89: mol_type = genomic RNA
accatgctgtagtgtgtgtaaacatcctacactctcagctgtgagctcaaggtggctgggagagggttgtttactccttctgccatgga

SEQ ID NO: 826 - RNA, 72 nt, Homo sapiens
  source 1..72: mol_type = genomic RNA
agatactgtaaacatcctacactctcagctgtggaaagtaagaaagctgggagaaggctgtttactctttct

SEQ ID NO: 827 - RNA, 70 nt, Homo sapiens
  source 1..70: mol_type = genomic RNA
gttgttgtaaacatccccgactggaagctgtaagacacagctaagctttcagtcagatgtttgctgctac

SEQ ID NO: 828 - RNA, 92 nt, Homo sapiens
  source 1..92: mol_type = genomic RNA
gggcagtctttgctactgtaaacatccttgactggaagctgtaaggtgttcagaggagctttcagtcggatgtttacagcggcaggctgcca

SEQ ID NO: 829 - RNA, 71 nt, Homo sapiens
  source 1..71: mol_type = genomic RNA
ggagaggaggcaagatgctggcatagctgttgaactgggaacctgctatgccaacatattgccatctttcc

SEQ ID NO: 830 - RNA, 70 nt, Homo sapiens
  source 1..70: mol_type = genomic RNA
ggagatattgcacattactaagttgcatgttgtcacggcctcaatgcaatttagtgtgtgtgatattttc

SEQ ID NO: 831 - RNA, 69 nt, Homo sapiens
  source 1..69: mol_type = genomic RNA
ctgtggtgcattgtagttgcattgcatgttctggtggtacccatgcaatgtttccacagtgcatcacag

SEQ ID NO: 832 - RNA, 96 nt, Homo sapiens
  source 1..96: mol_type = genomic RNA
gcgggcggccccgcggtgcattgctgttgcattgcacgtgtgtgaggcgggtgcagtgcctcggcagtgcagcccggagccggcccctggcaccac

SEQ ID NO: 833 - RNA, 110 nt, Homo sapiens
  source 1..110: mol_type = genomic RNA
ggccagctgtgagtgtttctttggcagtgtcttagctggttgttgtgagcaatagtaaggaagcaatcagcaagtatactgccctagaagtgctgcacgttgtggggccc

SEQ ID NO: 834 - RNA, 84 nt, Homo sapiens
  source 1..84: mol_type = genomic RNA
gtgctcggtttgtaggcagtgtcattagctgattgtactgtggtggttacaatcactaactccactgccatcaaaacaaggcac

SEQ ID NO: 835 - RNA, 77 nt, Homo sapiens
  source 1..77: mol_type = genomic RNA
agtctagttactaggcagtgtagttagctgattgctaatagtaccaatcactaaccacacggccaggtaaaaagatt

SEQ ID NO: 836 - RNA, 78 nt, Homo sapiens
  source 1..78: mol_type = genomic RNA
ctttctacacaggttgggatcggttgcaatgctgtgtttctgtatggtattgcacttgtcccggcctgttgagtttgg

SEQ ID NO: 837 - RNA, 75 nt, Homo sapiens
  source 1..75: mol_type = genomic RNA
tcatccctgggtggggatttgttgcattacttgtgttctatataaagtattgcacttgtcccggcctgtggaaga

SEQ ID NO: 838 - RNA, 96 nt, Homo sapiens
  source 1..96: mol_type = genomic RNA
cgggccccgggcgggcgggagggacgggacgcggtgcagtgttgttttttcccccgccaatattgcactcgtcccggcctccggcccccccggccc

SEQ ID NO: 839 - RNA, 80 nt, Homo sapiens
  source 1..80: mol_type = genomic RNA
ctgggggctccaaagtgctgttcgtgcaggtagtgtgattacccaacctactgctgagctagcacttcccgagcccccgg

SEQ ID NO: 840 - RNA, 81 nt, Homo sapiens
  source 1..81: mol_type = genomic RNA
aacacagtgggcactcaataaatgtctgttgaattgaaatgcgttacattcaacgggtatttattgagcacccactctgtg

SEQ ID NO: 841 - RNA, 78 nt, Homo sapiens
  source 1..78: mol_type = genomic RNA
tggccgattttggcactagcacatttttgcttgtgtctctccgctctgagcaatcatgtgcagtgccaatatgggaaa

SEQ ID NO: 842 - RNA, 119 nt, Homo sapiens
  source 1..119: mol_type = genomic RNA
aggattctgctcatgccagggtgaggtagtaagttgtattgttgtggggtagggatattaggccccaattagaagataactatacaacttactactttccctggtgtgtggcatattca

SEQ ID NO: 843 - RNA, 81 nt, Homo sapiens
  source 1..81: mol_type = genomic RNA
cccattggcataaacccgtagatccgatcttgtggtgaagtggaccgcacaagctcgcttctatgggtctgtgtcagtgtg

SEQ ID NO: 844 - RNA, 70 nt, Homo sapiens
  source 1..70: mol_type = genomic RNA
ggcacccacccgtagaaccgaccttgcggggccttcgccgcacacaagctcgtgtctgtgggtccgtgtc

SEQ ID NO: 845 - RNA, 80 nt, Homo sapiens
  source 1..80: mol_type = genomic RNA
cctgttgccacaaacccgtagatccgaacttgtggtattagtccgcacaagcttgtatctataggtatgtgtctgttagg

SEQ ID NO: 846 - RNA, 75 nt, Homo sapiens
  source 1..75: mol_type = genomic RNA
tgccctggctcagttatcacagtgctgatgctgtctattctaaaggtacagtactgtgataactgaaggatggca

SEQ ID NO: 847 - RNA, 79 nt, Homo sapiens
  source 1..79: mol_type = genomic RNA
actgtcctttttcggttatcatggtaccgatgctgtatatctgaaaggtacagtactgtgataactgaagaatggtggt

SEQ ID NO: 848 - RNA, 78 nt, Homo sapiens
  source 1..78: mol_type = genomic RNA
tactgccctcggcttctttacagtgctgccttgttgcatatggatcaagcagcattgtacagggctatgaaggcattg

SEQ ID NO: 849 - RNA, 78 nt, Homo sapiens
  source 1..78: mol_type = genomic RNA
ttgtgctttcagcttctttacagtgctgccttgtagcattcaggtcaagcagcattgtacagggctatgaaagaacca

SEQ ID NO: 850 - RNA, 62 nt, Homo sapiens
  source 1..62: mol_type = genomic RNA
tcatagccctgtacaatgctgcttgatccatatgcaacaaggcagcactgtaaagaagccga

SEQ ID NO: 851 - RNA, 62 nt, Homo sapiens
  source 1..62: mol_type = genomic RNA
tcatagccctgtacaatgctgcttgacctgaatgctacaaggcagcactgtaaagaagctga

SEQ ID NO: 852 - RNA, 81 nt, Homo sapiens
  source 1..81: mol_type = genomic RNA
tgtgcatcgtggtcaaatgctcagactcctgtggtggctgctcatgcaccacggatgtttgagcatgtgctacggtgtcta

SEQ ID NO: 853 - RNA, 81 nt, Homo sapiens
  source 1..81: mol_type = genomic RNA
tgtgcatcgtggtcaaatgctcagactcctgtggtggctgcttatgcaccacggatgtttgagcatgtgctatggtgtcta

SEQ ID NO: 854 - RNA, 81 nt, Homo sapiens
  source 1..81: mol_type = genomic RNA
ccttggccatgtaaaagtgcttacagtgcaggtagctttttgagatctactgcaatgtaagcacttcttacattaccatgg

SEQ ID NO: 855 - RNA, 82 nt, Homo sapiens
  source 1..82: mol_type = genomic RNA
cctgccggggctaaagtgctgacagtgcagatagtggtcctctccgtgctaccgcactgtgggtacttgctgctccagcagg

SEQ ID NO: 856 - RNA, 81 nt, Homo sapiens
  source 1..81: mol_type = genomic RNA
ctctctgctttcagcttctttacagtgttgccttgtggcatggagttcaagcagcattgtacagggctatcaaagcacaga

SEQ ID NO: 857 - RNA, 85 nt, Homo sapiens
  source 1..85: mol_type = genomic RNA
ccttagcagagctgtggagtgtgacaatggtgtttgtgtctaaactatcaaacgccattatcacactaaatagctactgctaggc

SEQ ID NO: 858 - RNA, 85 nt, Homo sapiens
  source 1..85: mol_type = genomic RNA
aggcctctctctccgtgttcacagcggaccttgatttaaatgtccatacaattaaggcacgcggtgaatgccaagaatggggctg

SEQ ID NO: 859 - RNA, 109 nt, Homo sapiens
  source 1..109: mol_type = genomic RNA
atcaagattagaggctctgctctccgtgttcacagcggaccttgatttaatgtcatacaattaaggcacgcggtgaatgccaagagcggagcctacggctgcacttgaa

SEQ ID NO: 860 - RNA, 87 nt, Homo sapiens
  source 1..87: mol_type = genomic RNA
tgagggcccctctgcgtgttcacagcggaccttgatttaatgtctatacaattaaggcacgcggtgaatgccaagagaggcgcctcc

SEQ ID NO: 861 - RNA, 86 nt, Homo sapiens
  source 1..86: mol_type = genomic RNA
tgccagtctctaggtccctgagaccctttaacctgtgaggacatccagggtcacaggtgaggttcttgggagcctggcgtctggcc

SEQ ID NO: 862 - RNA, 88 nt, Homo sapiens
  source 1..88: mol_type = genomic RNA
tgcgctcctctcagtccctgagaccctaacttgtgatgtttaccgtttaaatccacgggttaggctcttgggagctgcgagtcgtgct

SEQ ID NO: 863 - RNA, 89 nt, Homo sapiens
  source 1..89: mol_type = genomic RNA
accagacttttcctagtccctgagaccctaacttgtgaggtattttagtaacatcacaagtcaggctcttgggacctaggcggagggga

SEQ ID NO: 864 - RNA, 85 nt, Homo sapiens
  source 1..85: mol_type = genomic RNA
cgctggcgacgggacattattacttttggtacgcgctgtgacacttcaaactcgtaccgtgagtaataatgcgccgtccacggca

SEQ ID NO: 865 - RNA, 97 nt, Homo sapiens
  source 1..97: mol_type = genomic RNA
tgtgatcactgtctccagcctgctgaagctcagagggctctgattcagaaagatcatcggatccgtctgagcttggctggtcggaagtctcatcatc

SEQ ID NO: 866 - RNA, 82 nt, Homo sapiens
  source 1..82: mol_type = genomic RNA
tgagctgttggattcggggccgtagcactgtctgagaggtttacatttctcacagtgaaccggtctctttttcagctgcttc

SEQ ID NO: 867 - RNA, 84 nt, Homo sapiens
  source 1..84: mol_type = genomic RNA
tgtgcagtgggaaggggggccgatacactgtacgagagtgagtagcaggtctcacagtgaaccggtctctttccctactgtgtc

SEQ ID NO: 868 - RNA, 72 nt, Homo sapiens
  source 1..72: mol_type = genomic RNA
ggatctttttgcggtctgggcttgctgttcctctcaacagtagtcaggaagcccttaccccaaaaagtatct

SEQ ID NO: 869 - RNA, 90 nt, Homo sapiens
  source 1..90: mol_type = genomic RNA
tgcccttcgcgaatctttttgcggtctgggcttgctgtacataactcaatagccggaagcccttaccccaaaaagcatttgcggagggcg

SEQ ID NO: 870 - RNA, 89 nt, Homo sapiens
  source 1..89: mol_type = genomic RNA
tgctgctggccagagctcttttcacattgtgctactgtctgcacctgtcactagcagtgcaatgttaaaagggcattggccgtgtagtg

SEQ ID NO: 871 - RNA, 82 nt, Homo sapiens
  source 1..82: mol_type = genomic RNA
ggcctgcccgacactctttccctgttgcactactataggccgctgggaagcagtgcaatgatgaaagggcatcggtcaggtc

SEQ ID NO: 872 - RNA, 101 nt, Homo sapiens
  source 1..101: mol_type = genomic RNA
ccgcccccgcgtctccagggcaaccgtggctttcgattgttactgtgggaactggaggtaacagtctacagccatggtcgccccgcagcacgcccacgcgc

SEQ ID NO: 873 - RNA, 88 nt, Homo sapiens
  source 1..88: mol_type = genomic RNA
acaatgctttgctagagctggtaaaatggaaccaaatcgcctcttcaatggatttggtccccttcaaccagctgtagctatgcattga

SEQ ID NO: 874 - RNA, 102 nt, Homo sapiens
  source 1..102: mol_type = genomic RNA
gggagccaaatgctttgctagagctggtaaaatggaaccaaatcgactgtccaatggatttggtccccttcaaccagctgtagctgtgcattgatggcgccg

SEQ ID NO: 875 - RNA, 119 nt, Homo sapiens
  source 1..119: mol_type = genomic RNA
cctcagaagaaagatgccccctgctctggctggtcaaacggaaccaagtccgtcttcctgagaggtttggtccccttcaaccagctacagcagggctggcaatgcccagtccttggaga

SEQ ID NO: 876 - RNA, 73 nt, Homo sapiens
  source 1..73: mol_type = genomic RNA
cagggtgtgtgactggttgaccagaggggcatgcactgtgttcaccctgtgggccacctagtcaccaaccctc

SEQ ID NO: 877 - RNA, 90 nt, Homo sapiens
  source 1..90: mol_type = genomic RNA
aggcctcgctgttctctatggctttttattcctatgtgattctactgctcactcatatagggattggagccgtggcgcacggcggggaca

SEQ ID NO: 878 - RNA, 100 nt, Homo sapiens
  source 1..100: mol_type = genomic RNA
agataaattcactctagtgctttatggctttttattcctatgtgatagtaataaagtctcatgtagggatggaagccatgaaatacattgtgaaaaatca

SEQ ID NO: 879 - RNA, 97 nt, Homo sapiens
  source 1..97: mol_type = genomic RNA
cactctgctgtggcctatggcttttcattcctatgtgattgctgtcccaaactcatgtagggctaaaagccatgggctacagtgaggggcgagctcc

SEQ ID NO: 880 - RNA, 82 nt, Homo sapiens
  source 1..82: mol_type = genomic RNA
tgagccctcggaggactccatttgttttgatgatggattcttatgctccatcatcgtctcaaatgagtcttcagagggttct

SEQ ID NO: 881 - RNA, 102 nt, Homo sapiens
  source 1..102: mol_type = genomic RNA
ggtcctctgactctcttcggtgacgggtattcttgggtggataatacggattacgttgttattgcttaagaatacgcgtagtcgaggagagtaccagcggca

SEQ ID NO: 882 - RNA, 99 nt, Homo sapiens
  source 1..99: mol_type = genomic RNA
ccctggcatggtgtggtggggcagctggtgttgtgaatcaggccgttgccaatcagagaacggctacttcacaacaccagggccacaccacactacagg

SEQ ID NO: 883 - RNA, 84 nt, Homo sapiens
  source 1..84: mol_type = genomic RNA
cgttgctgcagctggtgttgtgaatcaggccgacgagcagcgcatcctcttacccggctatttcacgacaccagggttgcatca

SEQ ID NO: 884 - RNA, 68 nt, Homo sapiens
  source 1..68: mol_type = genomic RNA
gtgtattctacagtgcacgtgtctccagtgtggctcggaggctggagacgcggccctgttggagtaac

SEQ ID NO: 885 - RNA, 100 nt, Homo sapiens
  source 1..100: mol_type = genomic RNA
tgtgtctctctctgtgtcctgccagtggttttaccctatggtaggttacgtcatgctgttctaccacagggtagaaccacggacaggataccggggcacc

SEQ ID NO: 886 - RNA, 95 nt, Homo sapiens
  source 1..95: mol_type = genomic RNA
cggccggccctgggtccatcttccagtacagtgttggatggtctaattgtgaagctcctaacactgtctggtaaagatggctcccgggtgggttc

SEQ ID NO: 887 - RNA, 87 nt, Homo sapiens
  source 1..87: mol_type = genomic RNA
gacagtgcagtcacccataaagtagaaagcactactaacagcactggagggtgtagtgtttcctactttatggatgagtgtactgtg

SEQ ID NO: 888 - RNA, 106 nt, Homo sapiens
  source 1..106: mol_type = genomic RNA
gcgcagcgccctgtctcccagcctgaggtgcagtgctgcatctctggtcagttgggagtctgagatgaagcactgtagctcaggaagagagaagttgttctgcagc

SEQ ID NO: 889 - RNA, 86 nt, Homo sapiens
  source 1..86: mol_type = genomic RNA
tggggccctggctgggatatcatcatatactgtaagtttgcgatgagacactacagtatagatgatgtactagtccgggcaccccc

SEQ ID NO: 890 - RNA, 88 nt, Homo sapiens
  source 1..88: mol_type = genomic RNA
caccttgtcctcacggtccagttttcccaggaatcccttagatgctaagatggggattcctggaaatactgttcttgaggtcatggtt

SEQ ID NO: 891 - RNA, 99 nt, Homo sapiens
  source 1..99: mol_type = genomic RNA
ccgatgtgtatcctcagctttgagaactgaattccatgggttgtgtcagtgtcagacctctgaaattcagttcttcagctgggatatctctgtcatcgt

SEQ ID NO: 892 - RNA, 73 nt, Homo sapiens
  source 1..73: mol_type = genomic RNA
cctggcactgagaactgaattccataggctgtgagctctagcaatgccctgtggactcagttctggtgcccgg

SEQ ID NO: 893 - RNA, 72 nt, Homo sapiens
  source 1..72: mol_type = genomic RNA
aatctaaagacaacatttctgcacacacaccagactatggaagccagtgtgtggaaatgcttctgctagatt

SEQ ID NO: 894 - RNA, 80 nt, Homo sapiens
  source 1..80: mol_type = genomic RNA
tataaatctagtggaaacatttctgcacaaactagattctggacaccagtgtgcggaaatgcttctgctacatttttagg

SEQ ID NO: 895 - RNA, 68 nt, Homo sapiens
  source 1..68: mol_type = genomic RNA
gaggcaaagttctgagacactccgactctgagtatgatagaagtcagtgcactacagaactttgtctc

SEQ ID NO: 896 - RNA, 99 nt, Homo sapiens
  source 1..99: mol_type = genomic RNA
caagcacgattagcatttgaggtgaagttctgttatacactcaggctgtggctctctgaaagtcagtgcatcacagaactttgtctcgaaagctttcta

SEQ ID NO: 897 - RNA, 89 nt, Homo sapiens
  source 1..89: mol_type = genomic RNA
gccggcgcccgagctctggctccgtgtcttcactcccgtgcttgtccgaggagggagggagggacgggggctgtgctggggcagctgga

SEQ ID NO: 898 - RNA, 84 nt, Homo sapiens
  source 1..84: mol_type = genomic RNA
ctccccatggccctgtctcccaacccttgtaccagtgctgggctcagaccctggtacaggcctgggggacagggacctggggac

SEQ ID NO: 899 - RNA, 90 nt, Homo sapiens
  source 1..90: mol_type = genomic RNA
tttcctgccctcgaggagctcacagtctagtatgtctcatcccctactagactgaagctccttgaggacagggatggtcatactcacctc

SEQ ID NO: 900 - RNA, 96 nt, Homo sapiens
  source 1..96: mol_type = genomic RNA
acctctgatgtgtcagtctctcttcagggctcccgagacacagaaacagacacctgccctcgaggagctcacagtctagacaaacaaacccagggt

SEQ ID NO: 901 - RNA, 87 nt, Homo sapiens
  source 1..87: mol_type = genomic RNA
tgtcccccccggcccaggttctgtgatacactccgactcgggctctggagcagtcagtgcatgacagaacttgggcccggaaggacc

SEQ ID NO: 902 - RNA, 90 nt, Homo sapiens
  source 1..90: mol_type = genomic RNA
ctcacagctgccagtgtcatttttgtgatctgcagctagtattctcactccagttgcatagtcacaaaagtgatcattggcaggtgtggc

SEQ ID NO: 903 - RNA, 87 nt, Homo sapiens
  source 1..87: mol_type = genomic RNA
agcggtggccagtgtcatttttgtgatgttgcagctagtaatatgagcccagttgcatagtcacaaaagtgatcattggaaactgtg

SEQ ID NO: 904 - RNA, 84 nt, Homo sapiens
  source 1..84: mol_type = genomic RNA
gtggtacttgaagataggttatccgtgttgccttcgctttatttgtgacgaatcatacacggttgacctatttttcagtaccaa

SEQ ID NO: 905 - RNA, 65 nt, Homo sapiens
  source 1..65: mol_type = genomic RNA
ctgttaatgctaatcgtgataggggtttttgcctccaactgactcctacatattagcattaacag

SEQ ID NO: 906 - RNA, 110 nt, Homo sapiens
  source 1..110: mol_type = genomic RNA
tgagttttgaggttgcttcagtgaacattcaacgctgtcggtgagtttggaattaaaatcaaaaccatcgaccgttgattgtaccctatggctaaccatcatctactcca

SEQ ID NO: 907 - RNA, 110 nt, Homo sapiens
  source 1..110: mol_type = genomic RNA
agaagggctatcaggccagccttcagaggactccaaggaacattcaacgctgtcggtgagtttgggatttgaaaaaaccactgaccgttgactgtaccttggggtcctta

SEQ ID NO: 908 - RNA, 110 nt, Homo sapiens
  source 1..110: mol_type = genomic RNA
cctgtgcagagattattttttaaaaggtcacaatcaacattcattgctgtcggtgggttgaactgtgtggacaagctcactgaacaatgaatgcaactgtggccccgctt

SEQ ID NO: 909 - RNA, 89 nt, Homo sapiens
  source 1..89: mol_type = genomic RNA
ctgatggctgcactcaacattcattgctgtcggtgggtttgagtctgaatcaactcactgatcaatgaatgcaaactgcggaccaaaca

SEQ ID NO: 910 - RNA, 110 nt, Homo sapiens
  source 1..110: mol_type = genomic RNA
cggaaaatttgccaagggtttgggggaacattcaacctgtcggtgagtttgggcagctcaggcaaaccatcgaccgttgagtggaccctgaggcctggaattgccatcct

SEQ ID NO: 911 - RNA, 137 nt, Homo sapiens
  source 1..137: mol_type = genomic RNA
gtcccctcccctaggccacagccgaggtcacaatcaacattcattgttgtcggtgggttgtgaggactgaggccagacccaccgggggatgaatgtcactgtggctgggccagacacggcttaaggggaatggggac

SEQ ID NO: 912 - RNA, 110 nt, Homo sapiens
  source 1..110: mol_type = genomic RNA
gagctgcttgcctccccccgtttttggcaatggtagaactcacactggtgaggtaacaggatccggtggttctagacttgccaactatggggcgaggactcagccggcac

SEQ ID NO: 913 - RNA, 110 nt, Homo sapiens
  source 1..110: mol_type = genomic RNA
ccgcagagtgtgactcctgttctgtgtatggcactggtagaattcactgtgaacagtctcagtcagtgaattaccgaagggccataaacagagcagagacagatccacga

SEQ ID NO: 914 - RNA, 84 nt, Homo sapiens
  source 1..84: mol_type = genomic RNA
ccagtcacgtccccttatcacttttccagcccagctttgtgactgtaagtgttggacggagaactgataagggtaggtgattga

SEQ ID NO: 915 - RNA, 82 nt, Homo sapiens
  source 1..82: mol_type = genomic RNA
agggggcgagggattggagagaaaggcagttcctgatggtcccctccccaggggctggctttcctctggtccttccctccca

SEQ ID NO: 916 - RNA, 86 nt, Homo sapiens
  source 1..86: mol_type = genomic RNA
tgcttgtaactttccaaagaattctccttttgggctttctggttttattttaagcccaaaggtgaattttttgggaagtttgagct

SEQ ID NO: 917 - RNA, 109 nt, Homo sapiens
  source 1..109: mol_type = genomic RNA
ggtcgggctcaccatgacacagtgtgagacctcgggctacaacacaggacccgggcgctgctctgacccctcgtgtcttgtgttgcagccggagggacgcaggtccgca

SEQ ID NO: 918 - RNA, 86 nt, Homo sapiens
  source 1..86: mol_type = genomic RNA
tgctccctctctcacatcccttgcatggtggagggtgagctttctgaaaacccctcccacatgcagggtttgcaggatggcgagcc

SEQ ID NO: 919 - RNA, 85 nt, Homo sapiens
  source 1..85: mol_type = genomic RNA
tgcaggcctctgtgtgatatgtttgatatattaggttgttatttaatccaactatatatcaaacatattcctacagtgtcttgcc

SEQ ID NO: 920 - RNA, 79 nt, Homo sapiens
  source 1..79: mol_type = genomic RNA
tgcttctgtgtgatatgtttgatattgggttgtttaattaggaaccaactaaatgtcaaacatattcttacagcagcag

SEQ ID NO: 921 - RNA, 92 nt, Homo sapiens
  source 1..92: mol_type = genomic RNA
cggctggacagcgggcaacggaatcccaaaagcagctgttgtctccagagcattccagctgcgcttggatttcgtcccctgctctcctgcct

SEQ ID NO: 922 - RNA, 110 nt, Homo sapiens
  source 1..110: mol_type = genomic RNA
gccgagaccgagtgcacagggctctgacctatgaattgacagccagtgctctcgtctcccctctggctgccaattccataggtcacaggtatgttcgcctcaatgccagc

SEQ ID NO: 923 - RNA, 88 nt, Homo sapiens
  source 1..88: mol_type = genomic RNA
cgaggatgggagctgagggctgggtctttgcgggcgagatgagggtgtcggatcaactggcctacaaagtcccagttctcggcccccg

SEQ ID NO: 924 - RNA, 83 nt, Homo sapiens
  source 1..83: mol_type = genomic RNA
gtggtctcagaatcggggttttgagggcgagatgagtttatgttttatccaactggccctcaaagtcccgcttttggggtcat

SEQ ID NO: 925 - RNA, 85 nt, Homo sapiens
  source 1..85: mol_type = genomic RNA
atggtgttatcaagtgtaacagcaactccatgtggactgtgtaccaatttccagtggagatgctgttacttttgatggttaccaa

SEQ ID NO: 926 - RNA, 85 nt, Homo sapiens
  source 1..85: mol_type = genomic RNA
tggttcccgccccctgtaacagcaactccatgtggaagtgcccactggttccagtggggctgctgttatctggggcgagggccag

SEQ ID NO: 927 - RNA, 87 nt, Homo sapiens
  source 1..87: mol_type = genomic RNA
agcttccctggctctagcagcacagaaatattggcacagggaagcgagtctgccaatattggctgtgctgctccaggcagggtggtg

SEQ ID NO: 928 - RNA, 70 nt, Homo sapiens
  source 1..70: mol_type = genomic RNA
gtgaattaggtagtttcatgttgttgggcctgggtttctgaacacaacaacattaaaccacccgattcac

SEQ ID NO: 929 - RNA, 110 nt, Homo sapiens
  source 1..110: mol_type = genomic RNA
tgctcgctcagctgatctgtggcttaggtagtttcatgttgttgggattgagttttgaactcggcaacaagaaactgcctgagttacatcagtcggttttcgtcgagggc

SEQ ID NO: 930 - RNA, 84 nt, Homo sapiens
  source 1..84: mol_type = genomic RNA
actggtcggtgatttaggtagtttcctgttgttgggatccacctttctctcgacagcacgacactgccttcattacttcagttg

SEQ ID NO: 931 - RNA, 75 nt, Homo sapiens
  source 1..75: mol_type = genomic RNA
ggctgtgccgggtagagagggcagtgggaggtaagagctcttcacccttcaccaccttctccacccagcatggcc

SEQ ID NO: 932 - RNA, 62 nt, Homo sapiens
  source 1..62: mol_type = genomic RNA
tcattggtccagaggggagataggttcctgtgatttttccttcttctctatagaataaatga

SEQ ID NO: 933 - RNA, 71 nt, Homo sapiens
  source 1..71: mol_type = genomic RNA
gccaacccagtgttcagactacctgttcaggaggctctcaatgtgtacagtagtctgcacattggttaggc

SEQ ID NO: 934 - RNA, 110 nt, Homo sapiens
  source 1..110: mol_type = genomic RNA
aggaagcttctggagatcctgctccgtcgccccagtgttcagactacctgttcaggacaatgccgttgtacagtagtctgcacattggttagactgggcaagggagagca

SEQ ID NO: 935 - RNA, 110 nt, Homo sapiens
  source 1..110: mol_type = genomic RNA
ccagaggacacctccactccgtctacccagtgtttagactatctgttcaggactcccaaattgtacagtagtctgcacattggttaggctgggctgggttagaccctcgg

SEQ ID NO: 936 - RNA, 90 nt, Homo sapiens
  source 1..90: mol_type = genomic RNA
ccgggcccctgtgagcatcttaccggacagtgctggatttcccagcttgactctaacactgtctggtaacgatgttcaaaggtgacccgc

SEQ ID NO: 937 - RNA, 95 nt, Homo sapiens
  source 1..95: mol_type = genomic RNA
ccagctcgggcagccgtggccatcttactgggcagcattggatggagtcaggtctctaatactgcctggtaatgatgacggcggagccctgcacg

SEQ ID NO: 938 - RNA, 68 nt, Homo sapiens
  source 1..68: mol_type = genomic RNA
ccctcgtcttacccagcagtgtttgggtgcggttgggagtctctaatactgccgggtaatgatggagg

SEQ ID NO: 939 - RNA, 110 nt, Homo sapiens
  source 1..110: mol_type = genomic RNA
cgcctcagagccgcccgccgttcctttttcctatgcatatacttctttgaggatctggcctaaagaggtatagggcatgggaaaacggggcggtcgggtcctccccagcg

SEQ ID NO: 940 - RNA, 110 nt, Homo sapiens
  source 1..110: mol_type = genomic RNA
gtgttggggactcgcgcgctgggtccagtggttcttaacagttcaacagttctgtagcgcaattgtgaaatgtttaggaccactagacccggcgggcgcggcgacagcga

SEQ ID NO: 941 - RNA, 110 nt, Homo sapiens
  source 1..110: mol_type = genomic RNA
ggctacagtctttcttcatgtgactcgtggacttccctttgtcatcctatgcctgagaatatatgaaggaggctgggaaggcaaagggacgttcaattgtcatcactggc

SEQ ID NO: 942 - RNA, 110 nt, Homo sapiens
  source 1..110: mol_type = genomic RNA
aaagatcctcagacaatccatgtgcttctcttgtccttcattccaccggagtctgtctcatacccaaccagatttcagtggagtgaagttcaggaggcatggagctgaca

SEQ ID NO: 943 - RNA, 86 nt, Homo sapiens
  source 1..86: mol_type = genomic RNA
tgcttcccgaggccacatgcttctttatatccccatatggattactttgctatggaatgtaaggaagtgtgtggtttcggcaagtg

SEQ ID NO: 944 - RNA, 71 nt, Homo sapiens
  source 1..71: mol_type = genomic RNA
tgacgggcgagcttttggcccgggttatacctgatgctcacgtataagacgagcaaaaagcttgttggtca

SEQ ID NO: 945 - RNA, 77 nt, Homo sapiens
  source 1..77: mol_type = genomic RNA
cctctcagggaagctttttgctcgaattatgtttctgatccgaatataagacgaacaaaaggtttgtctgagggcag

SEQ ID NO: 946 - RNA, 110 nt, Homo sapiens
  source 1..110: mol_type = genomic RNA
acccggcagtgcctccaggcgcagggcagcccctgcccaccgcacactgcgctgccccagacccactgtgcgtgtgacagcggctgatctgtgcctgggcagcgcgaccc

SEQ ID NO: 947 - RNA, 110 nt, Homo sapiens
  source 1..110: mol_type = genomic RNA
tcacctggccatgtgacttgtgggcttccctttgtcatccttcgcctagggctctgagcagggcagggacagcaaaggggtgctcagttgtcacttcccacagcacggag

SEQ ID NO: 948 - RNA, 110 nt, Homo sapiens
  source 1..110: mol_type = genomic RNA
cggggcaccccgcccggacagcgcgccggcaccttggctctagactgcttactgcccgggccgccctcagtaacagtctccagtcacggccaccgacgcctggccccgcc

SEQ ID NO: 949 - RNA, 110 nt, Homo sapiens
  source 1..110: mol_type = genomic RNA
ggcctggctggacagagttgtcatgtgtctgcctgtctacacttgctgtgcagaacatccgctcacctgtacagcaggcacagacaggcagtcacatgacaacccagcct

SEQ ID NO: 950 - RNA, 110 nt, Homo sapiens
  source 1..110: mol_type = genomic RNA
atcattcagaaatggtatacaggaaaatgacctatgaattgacagacaatatagctgagtttgtctgtcatttctttaggccaatattctgtatgactgtgctacttcaa

SEQ ID NO: 951 - RNA, 110 nt, Homo sapiens
  source 1..110: mol_type = genomic RNA
gatggctgtgagttggcttaatctcagctggcaactgtgagatgttcatacaatccctcacagtggtctctgggattatgctaaacagagcaatttcctagccctcacga

SEQ ID NO: 952 - RNA, 82 nt, Homo sapiens
  source 1..82: mol_type = genomic RNA
gcagactggaaaatctctgcaggcaaatgtgatgtcactgaggaaatcacacacttacccgtagagattctacagtctgaca

SEQ ID NO: 953 - RNA, 110 nt, Homo sapiens
  source 1..110: mol_type = genomic RNA
agtataattattacatagtttttgatgtcgcagatactgcatcaggaactgattggataagaatcagtcaccatcagttcctaatgcattgccttcagcatctaaacaag

SEQ ID NO: 954 - RNA, 110 nt, Homo sapiens
  source 1..110: mol_type = genomic RNA
gtgataatgtagcgagattttctgttgtgcttgatctaaccatgtggttgcgaggtatgagtaaaacatggttccgtcaagcaccatggaacgtcacgcagctttctaca

SEQ ID NO: 955 - RNA, 110 nt, Homo sapiens
  source 1..110: mol_type = genomic RNA
gaccagtcgctgcggggctttcctttgtgcttgatctaaccatgtggtggaacgatggaaacggaacatggttctgtcaagcaccgcggaaagcaccgtgctctcctgca

SEQ ID NO: 956 - RNA, 110 nt, Homo sapiens
  source 1..110: mol_type = genomic RNA
ccgccccgggccgcggctcctgattgtccaaacgcaattctcgagtctatggctccggccgagagttgagtctggacgtcccgagccgccgcccccaaacctcgagcggg

SEQ ID NO: 957 - RNA, 97 nt, Homo sapiens
  source 1..97: mol_type = genomic RNA
actcaggggcttcgccactgattgtccaaacgcaattcttgtacgagtctgcggccaaccgagaattgtggctggacatctgtggctgagctccggg

SEQ ID NO: 958 - RNA, 110 nt, Homo sapiens
  source 1..110: mol_type = genomic RNA
tgaacatccaggtctggggcatgaacctggcatacaatgtagatttctgtgttcgttaggcaacagctacattgtctgctgggtttcaggctacctggaaacatgttctc

SEQ ID NO: 959 - RNA, 110 nt, Homo sapiens
  source 1..110: mol_type = genomic RNA
gctgctggaaggtgtaggtaccctcaatggctcagtagccagtgtagatcctgtctttcgtaatcagcagctacatctggctactgggtctctgatggcatcttctagct

SEQ ID NO: 960 - RNA, 110 nt, Homo sapiens
  source 1..110: mol_type = genomic RNA
cctggcctcctgcagtgccacgctccgtgtatttgacaagctgagttggacactccatgtggtagagtgtcagtttgtcaaataccccaagtgcggcacatgcttaccag

SEQ ID NO: 961 - RNA, 81 nt, Homo sapiens
  source 1..81: mol_type = genomic RNA
gggctttcaagtcactagtggttccgtttagtagatgattgtgcattgtttcaaaatggtgccctagtgactacaaagccc

SEQ ID NO: 962 - RNA, 80 nt, Homo sapiens
  source 1..80: mol_type = genomic RNA
aggacccttccagagggccccccctcaatcctgttgtgcctaattcagagggttgggtggaggctctcctgaagggctct

SEQ ID NO: 963 - RNA, 66 nt, Homo sapiens
  source 1..66: mol_type = genomic RNA
tgtatgtatgtgtgcatgtgcatgtatgtgtatatacatatatatgtattatgtactcatatatca

SEQ ID NO: 964 - RNA, 88 nt, Homo sapiens
  source 1..88: mol_type = genomic RNA
tcaggtcttcagcagaagcagggaggttctcccagtggttttccttgactgtgaggaactagcctgctgctttgctcaggagtgagct

SEQ ID NO: 965 - RNA, 63 nt, Homo sapiens
  source 1..63: mol_type = genomic RNA
aagaaatggtttaccgtcccacatacattttgaatatgtatgtgggatggtaaaccgcttctt

SEQ ID NO: 966 - RNA, 83 nt, Homo sapiens
  source 1..83: mol_type = genomic RNA
tgctacttgaagagaggtaatccttcacgcatttgctttacttgcaatgattatacaagggcagactctctctggggagcaaa

SEQ ID NO: 967 - RNA, 86 nt, Homo sapiens
  source 1..86: mol_type = genomic RNA
actgctaacgaatgctctgactttattgcactactgtactttacagctagcagtgcaatagtattgtcaaagcatctgaaagcagg

SEQ ID NO: 968 - RNA, 78 nt, Homo sapiens
  source 1..78: mol_type = genomic RNA
gccgcaggtgctctgacgaggttgcactactgtgctctgagaagcagtgcaatgatattgtcaaagcatctgggacca

SEQ ID NO: 969 - RNA, 69 nt, Homo sapiens
  source 1..69: mol_type = genomic RNA
ccaccacttaaacgtggatgtacttgctttgaaactaaagaagtaagtgcttccatgttttggtgatgg

SEQ ID NO: 970 - RNA, 73 nt, Homo sapiens
  source 1..73: mol_type = genomic RNA
gctcccttcaactttaacatggaagtgctttctgtgactttaaaagtaagtgcttccatgttttagtaggagt

SEQ ID NO: 971 - RNA, 68 nt, Homo sapiens
  source 1..68: mol_type = genomic RNA
cctttgctttaacatgggggtacctgctgtgtgaaacaaaagtaagtgcttccatgtttcagtggagg

SEQ ID NO: 972 - RNA, 68 nt, Homo sapiens
  source 1..68: mol_type = genomic RNA
cctctactttaacatggaggcacttgctgtgacatgacaaaaataagtgcttccatgtttgagtgtgg

SEQ ID NO: 973 - RNA, 72 nt, Homo sapiens
  source 1..72: mol_type = genomic RNA
ttgggtaagtgcttccatgcttcagtttccttactggtaagatggatgtagtaatagcacctaccttataga

SEQ ID NO: 974 - RNA, 51 nt, Homo sapiens
  source 1..51: mol_type = genomic RNA
tctgtgtaaacctggcaattttcacttaattgcttccatgtttataaaaga

SEQ ID NO: 975 - RNA, 82 nt, Homo sapiens
  source 1..82: mol_type = genomic RNA
gcttcgctcccctccgccttctcttcccggttcttcccggagtcgggaaaagctgggttgagagggcgaaaaaggatgaggt

SEQ ID NO: 976 - RNA, 79 nt, Homo sapiens
  source 1..79: mol_type = genomic RNA
aattaatccctctctttctagttcttcctagagtgaggaaaagctgggttgagagggcaaacaaattaactaattaatt

SEQ ID NO: 977 - RNA, 138 nt, Homo sapiens
  source 1..138: mol_type = genomic RNA
tgttattttttgtcttctacctaagaattctgtctcttaggctttctcttcccagatttcccaaagttgggaaaagctgggttgagagggcaaaaggaaaaaaaaagaattctgtctctgacataattagatagggaa

SEQ ID NO: 978 - RNA, 88 nt, Homo sapiens
  source 1..88: mol_type = genomic RNA
tttgcattaaaaatgaggccttctcttcccagttcttcccagagtcaggaaaagctgggttgagagggtagaaaaaaaatgatgtagg

SEQ ID NO: 979 - RNA, 50 nt, Homo sapiens
  source 1..50: mol_type = genomic RNA
cttctctttccagttcttcccagaattgggaaaagctgggttgagagggt

SEQ ID NO: 980 - RNA, 48 nt, Homo sapiens
  source 1..48: mol_type = genomic RNA
ttctcgtcccagttcttcccaaagttgagaaaagctgggttgagagga

SEQ ID NO: 981 - RNA, 48 nt, Homo sapiens
  source 1..48: mol_type = genomic RNA
ttctcttcccagttcttcttggagtcaggaaaagctgggttgagagga

SEQ ID NO: 982 - RNA, 53 nt, Homo sapiens
  source 1..53: mol_type = genomic RNA
gccttctcttcccagttcttcctggagtcggggaaaagctgggttgagaaggt

SEQ ID NO: 983 - RNA, 86 nt, Homo sapiens
  source 1..86: mol_type = genomic RNA
ttggtacttggagagaggtggtccgtggcgcgttcgctttatttatggcgcacattacacggtcgacctctttgcagtatctaatc

SEQ ID NO: 984 - RNA, 82 nt, Homo sapiens
  source 1..82: mol_type = genomic RNA
tggtactcggagggaggttgtccgtggtgagttcgcattatttaatgatgcccaatacacggtcgacctcttttcggtatca

SEQ ID NO: 985 - RNA, 83 nt, Homo sapiens
  source 1..83: mol_type = genomic RNA
ctgactatgcctccccgcatcccctagggcattggtgtaaagctggagacccactgccccaggtgctgctgggggttgtagtc

SEQ ID NO: 986 - RNA, 98 nt, Homo sapiens
  source 1..98: mol_type = genomic RNA
atacagtgcttggttcctagtaggtgtccagtaagtgtttgtgacataatttgtttattgaggacctcctatcaatcaagcactgtgctaggctctgg

SEQ ID NO: 987 - RNA, 95 nt, Homo sapiens
  source 1..95: mol_type = genomic RNA
ctcatctgtctgttgggctggaggcagggcctttgtgaaggcgggtggtgctcagatcgcctctgggcccttcctccagccccgaggcggattca

SEQ ID NO: 988 - RNA, 75 nt, Homo sapiens
  source 1..75: mol_type = genomic RNA
tggagtgggggggcaggaggggctcagggagaaagtgcatacagcccctggccctctctgcccttccgtcccctg

SEQ ID NO: 989 - RNA, 80 nt, Homo sapiens
  source 1..80: mol_type = genomic RNA
ggtacctgaagagaggttttctgggtttctgtttctttaatgaggacgaaacacacctggttaacctcttttccagtatc

SEQ ID NO: 990 - RNA, 84 nt, Homo sapiens
  source 1..84: mol_type = genomic RNA
gtggtacctgaagagaggttttctgggtttctgtttctttattgaggacgaaacacacctggttaacctcttttccagtatcaa

SEQ ID NO: 991 - RNA, 94 nt, Homo sapiens
  source 1..94: mol_type = genomic RNA
ctttggcgatcactgcctctctgggcctgtgtcttaggctctgcaagatcaaccgagcaaagcacacggcctgcagagaggcagcgctctgccc

SEQ ID NO: 992 - RNA, 94 nt, Homo sapiens
  source 1..94: mol_type = genomic RNA
gagtttggttttgtttgggtttgttctaggtatggtcccagggatcccagatcaaaccaggcccctgggcctatcctagaaccaacctaagctc

SEQ ID NO: 993 - RNA, 94 nt, Homo sapiens
  source 1..94: mol_type = genomic RNA
tgttttgagcgggggtcaagagcaataacgaaaaatgtttgtcataaaccgtttttcattattgctcctgacctcctctcatttgctatattca

SEQ ID NO: 994 - RNA, 93 nt, Homo sapiens
  source 1..93: mol_type = genomic RNA
gtagtcagtagttggggggtgggaacggcttcatacaggagttgatgcacagttatccagctcctatatgatgcctttcttcatccccttcaa

SEQ ID NO: 995 - RNA, 67 nt, Homo sapiens
  source 1..67: mol_type = genomic RNA
tctccaacaatatcctggtgctgagtgatgactcaggcgactccagcatcagtgattttgttgaaga

SEQ ID NO: 996 - RNA, 94 nt, Homo sapiens
  source 1..94: mol_type = genomic RNA
cggggcggccgctctccctgtcctccaggagctcacgtgtgcctgcctgtgagcgcctcgacgacagagccggcgcctgccccagtgtctgcgc

SEQ ID NO: 997 - RNA, 95 nt, Homo sapiens
  source 1..95: mol_type = genomic RNA
ttgtacctggtgtgattataaagcaatgagactgattgtcatatgtcgtttgtgggatccgtctcagttactttatagccatacctggtatctta

SEQ ID NO: 998 - RNA, 99 nt, Homo sapiens
  source 1..99: mol_type = genomic RNA
gaaactgggctcaaggtgaggggtgctatctgtgattgagggacatggttaatggaattgtctcacacagaaatcgcacccgtcaccttggcctactta

SEQ ID NO: 999 - RNA, 98 nt, Homo sapiens
  source 1..98: mol_type = genomic RNA
acccaaaccctaggtctgctgactcctagtccagggctcgtgatggctggtgggccctgaacgaggggtctggaggcctgggtttgaatatcgacagc

SEQ ID NO: 1000 - RNA, 95 nt, Homo sapiens
  source 1..95: mol_type = genomic RNA
ggtctctgtgttgggcgtctgtctgcccgcatgcctgcctctctgttgctctgaaggaggcaggggctgggcctgcagctgcctgggcagagcgg

SEQ ID NO: 1001 - RNA, 72 nt, Homo sapiens
  source 1..72: mol_type = genomic RNA
ggagcttatcagaatctccaggggtactttataatttcaaaaagtcccccaggtgtgattctgatttgcttc

SEQ ID NO: 1002 - RNA, 65 nt, Homo sapiens
  source 1..65: mol_type = genomic RNA
cttgaatccttggaacctaggtgtgagtgctatttcagtgcaacacacctattcaaggattcaaa

SEQ ID NO: 1003 - RNA, 75 nt, Homo sapiens
  source 1..75: mol_type = genomic RNA
tgttgtcgggtggatcacgatgcaattttgatgagtatcataggagaaaaattgcacggtatccatctgtaaacc

SEQ ID NO: 1004 - RNA, 87 nt, Homo sapiens
  source 1..87: mol_type = genomic RNA
accgcagggaaaatgagggacttttgggggcagatgtgtttccattccactatcataatgcccctaaaaatccttattgctcttgca

SEQ ID NO: 1005 - RNA, 111 nt, Homo sapiens
  source 1..111: mol_type = genomic RNA
agagtgttcaaggacagcaagaaaaatgagggactttcaggggcagctgtgttttctgactcagtcataatgcccctaaaaatccttattgttcttgcagtgtgcatcggg

SEQ ID NO: 1006 - RNA, 68 nt, Homo sapiens
  source 1..68: mol_type = genomic RNA
ccattactgttgctaatatgcaactctgttgaatataaattggaattgcactttagcaatggtgatgg

SEQ ID NO: 1007 - RNA, 70 nt, Homo sapiens
  source 1..70: mol_type = genomic RNA
ttgaagggagatcgaccgtgttatattcgctttattgacttcgaataatacatggttgatcttttctcag

SEQ ID NO: 1008 - RNA, 75 nt, Homo sapiens
  source 1..75: mol_type = genomic RNA
agacagagaagccaggtcacgtctctgcagttacacagctcacgagtgcctgctggggtggaacctggtctgtct

SEQ ID NO: 1009 - RNA, 67 nt, Homo sapiens
  source 1..67: mol_type = genomic RNA
gtggcactcaaactgtgggggcactttctgctctctggtgaaagtgccgccatcttttgagtgttac

SEQ ID NO: 1010 - RNA, 66 nt, Homo sapiens
  source 1..66: mol_type = genomic RNA
ggtaacactcaaaagatggcggcactttcaccagagagcagaaagtgcccccacagtttgagtgcc

SEQ ID NO: 1011 - RNA, 67 nt, Homo sapiens
  source 1..67: mol_type = genomic RNA
gtgggcctcaaatgtggagcactattctgatgtccaagtggaaagtgctgcgacatttgagcgtcac

SEQ ID NO: 1012 - RNA, 69 nt, Homo sapiens
  source 1..69: mol_type = genomic RNA
gggatactcaaaatgggggcgctttcctttttgtctgtactgggaagtgcttcgattttggggtgtccc

SEQ ID NO: 1013 - RNA, 72 nt, Homo sapiens
  source 1..72: mol_type = genomic RNA
tacatcggccattataatacaacctgataagtgttatagcacttatcagattgtattgtaattgtctgtgta

SEQ ID NO: 1014 - RNA, 72 nt, Homo sapiens
  source 1..72: mol_type = genomic RNA
actcggatggatataatacaacctgctaagtgtcctagcacttagcaggttgtattatcattgtccgtgtct

SEQ ID NO: 1015 - RNA, 70 nt, Homo sapiens
  source 1..70: mol_type = genomic RNA
acacggacaatgataatacaacctgctaagtgctaggacacttagcaggttgtattatatccatccgagt

SEQ ID NO: 1016 - RNA, 64 nt, Homo sapiens
  source 1..64: mol_type = genomic RNA
ccccgcgacgagcccctcgcacaaaccggacctgagcgttttgttcgttcggctcgcgtgaggc

SEQ ID NO: 1017 - RNA, 68 nt, Homo sapiens
  source 1..68: mol_type = genomic RNA
taaaaggtagattctccttctatgagtacattatttatgattaatcatagaggaaaatccacgttttc

SEQ ID NO: 1018 - RNA, 80 nt, Homo sapiens
  source 1..80: mol_type = genomic RNA
ggtatttaaaaggtagattttccttctatggttacgtgtttgatggttaatcatagaggaaaatccacgttttcagtatc

SEQ ID NO: 1019 - RNA, 100 nt, Homo sapiens
  source 1..100: mol_type = genomic RNA
cagtccttctttggtatttaaaacgtggatattccttctatgtttacgtgattcctggttaatcatagaggaaaatccatgttttcagtatcaaatgctg

SEQ ID NO: 1020 - RNA, 66 nt, Homo sapiens
  source 1..66: mol_type = genomic RNA
aaaaggtggatattccttctatgtttatgttatttatggttaaacatagaggaaattccacgtttt

SEQ ID NO: 1021 - RNA, 69 nt, Homo sapiens
  source 1..69: mol_type = genomic RNA
ttgagcagaggttgcccttggtgaattcgctttatttatgttgaatcacacaaaggcaacttttgtttg

SEQ ID NO: 1022 - RNA, 66 nt, Homo sapiens
  source 1..66: mol_type = genomic RNA
agggctcctgactccaggtcctgtgtgttacctagaaatagcactggacttggagtcagaaggcct

SEQ ID NO: 1023 - RNA, 57 nt, Homo sapiens
  source 1..57: mol_type = genomic RNA
ggtcattgagtcttcaaggctagtggaaagagcactggacttggaggcagaaagacc

SEQ ID NO: 1024 - RNA, 81 nt, Homo sapiens
  source 1..81: mol_type = genomic RNA
ggaggccatcactggacttggagtcagaagagtggagtcgggtcagacttcaactctgactttgaaggtggtgagtgcctc

SEQ ID NO: 1025 - RNA, 54 nt, Homo sapiens
  source 1..54: mol_type = genomic RNA
actgtttctgtccttgttcttgttgttattactggacttggagtcagaaacagg

SEQ ID NO: 1026 - RNA, 98 nt, Homo sapiens
  source 1..98: mol_type = genomic RNA
gaatggttacaaggagagaacactggacttggagtcagaaaactttcatccaagtcattccctgctctaagtcccatttctgttccatgagattgttt

SEQ ID NO: 1027 - RNA, 79 nt, Homo sapiens
  source 1..79: mol_type = genomic RNA
ctgactccagtgtccaggccaggggcagacagtggacagagaacagtgcccaagaccactggacttggagtcaggacat

SEQ ID NO: 1028 - RNA, 78 nt, Homo sapiens
  source 1..78: mol_type = genomic RNA
gtcaggtcctggactcccatagttttcaggctgctaaacaacagaacgagcactggacttggagccagaagtcttggg

SEQ ID NO: 1029 - RNA, 41 nt, Homo sapiens
  source 1..41: mol_type = genomic RNA
cactgggcttggagtcagaagacctggctccagcccagctc

SEQ ID NO: 1030 - RNA, 83 nt, Homo sapiens
  source 1..83: mol_type = genomic RNA
acaggaacactggacttggtgtcagatgggatgagccctggctctgtttcctagcagcaatctgatcttgagctagtcactgg

SEQ ID NO: 1031 - RNA, 76 nt, Homo sapiens
  source 1..76: mol_type = genomic RNA
gggagcactggactaggagtcagaaggtggagttctgggtgctgttttcccactcttgggccctgggcatgttctg

SEQ ID NO: 1032 - RNA, 67 nt, Homo sapiens
  source 1..67: mol_type = genomic RNA
agagatggtagactatggaacgtaggcgttatgatttctgacctatgtaacatggtccactaactct

SEQ ID NO: 1033 - RNA, 61 nt, Homo sapiens
  source 1..61: mol_type = genomic RNA
aagatggttgaccatagaacatgcgctatctctgtgtcgtatgtaatatggtccacatctt

SEQ ID NO: 1034 - RNA, 75 nt, Homo sapiens
  source 1..75: mol_type = genomic RNA
tacttaaagcgaggttgccctttgtatattcggtttattgacatggaatatacaagggcaagctctctgtgagta

SEQ ID NO: 1035 - RNA, 76 nt, Homo sapiens
  source 1..76: mol_type = genomic RNA
tacttgaagagaagttgttcgtggtggattcgctttacttatgacgaatcattcacggacaacacttttttcagta

SEQ ID NO: 1036 - RNA, 73 nt, Homo sapiens
  source 1..73: mol_type = genomic RNA
ctcctcagatcagaaggtgattgtggctttgggtggatattaatcagccacagcactgcctggtcagaaagag

SEQ ID NO: 1037 - RNA, 88 nt, Homo sapiens
  source 1..88: mol_type = genomic RNA
tgttaaatcaggaattttaaacaattcctagacaatatgtataatgttcataagtcattcctagaaattgttcataatgcctgtaaca

SEQ ID NO: 1038 - RNA, 79 nt, Homo sapiens
  source 1..79: mol_type = genomic RNA
tggtactcggggagaggttacccgagcaactttgcatctggacgacgaatgttgctcggtgaaccccttttcggtatca

SEQ ID NO: 1039 - RNA, 80 nt, Homo sapiens
  source 1..80: mol_type = genomic RNA
ggtacctgagaagaggttgtctgtgatgagttcgcttttattaatgacgaatataacacagatggcctgttttcagtacc

SEQ ID NO: 1040 - RNA, 96 nt, Homo sapiens
  source 1..96: mol_type = genomic RNA
tggtacttggagagatagtagaccgtatagcgtacgctttatctgtgacgtatgtaacacggtccactaaccctcagtatcaaatccatccccgag

SEQ ID NO: 1041 - RNA, 91 nt, Homo sapiens
  source 1..91: mol_type = genomic RNA
ctggggtacggggatggatggtcgaccagttggaaagtaattgtttctaatgtacttcacctggtccactagccgtccgtatccgctgcag

SEQ ID NO: 1042 - RNA, 85 nt, Homo sapiens
  source 1..85: mol_type = genomic RNA
gcacattgtaggcctcattaaatgtttgttgaatgaaaaaatgaatcatcaacagacattaattgggcgcctgctctgtgatctc

SEQ ID NO: 1043 - RNA, 90 nt, Homo sapiens
  source 1..90: mol_type = genomic RNA
gagagaagcactggacttagggtcagaaggcctgagtctctctgctgcagatgggctctctgtccctgagccaagctttgtcctccctgg

SEQ ID NO: 1044 - RNA, 94 nt, Homo sapiens
  source 1..94: mol_type = genomic RNA
ataaaggaagttaggctgaggggcagagagcgagacttttctattttccaaaagctcggtctgaggcccctcagtcttgcttcctaacccgcgc

SEQ ID NO: 1045 - RNA, 98 nt, Homo sapiens
  source 1..98: mol_type = genomic RNA
cgaggggatacagcagcaattcatgttttgaagtgttctaaatggttcaaaacgtgaggcgctgctataccccctcgtggggaaggtagaaggtgggg

SEQ ID NO: 1046 - RNA, 87 nt, Homo sapiens
  source 1..87: mol_type = genomic RNA
gaaagcgctttggaatgacacgatcactcccgttgagtgggcacccgagaagccatcgggaatgtcgtgtccgcccagtgctctttc

SEQ ID NO: 1047 - RNA, 83 nt, Homo sapiens
  source 1..83: mol_type = genomic RNA
cgccggccgatgggcgtcttaccagacatggttagacctggccctctgtctaatactgtctggtaaaaccgtccatccgctgc

SEQ ID NO: 1048 - RNA, 114 nt, Homo sapiens
  source 1..114: mol_type = genomic RNA
tcctgcttgtcctgcgaggtgtcttgcaggccgtcatgcaggccacactgacggtaacgttgcaggtcgtcttgcagggcttctcgcaagacgacatcctcatcaccaacgacg

SEQ ID NO: 1049 - RNA, 94 nt, Homo sapiens
  source 1..94: mol_type = genomic RNA
tgactcctccaggtcttggagtaggtcattgggtggatcctctatttccttacgtgggccactggatggctcctccatgtcttggagtagatca

SEQ ID NO: 1050 - RNA, 93 nt, Homo sapiens
  source 1..93: mol_type = genomic RNA
ccggggagaagtacggtgagcctgtcattattcagagaggctagatcctctgtgttgagaaggatcatgatgggctcctcggtgttctccagg

SEQ ID NO: 1051 - RNA, 111 nt, Homo sapiens
  source 1..111: mol_type = genomic RNA
gccgggaggttgaacatcctgcatagtgctgccaggaaatccctatttcatataagagggggctggctggttgcatatgtaggatgtcccatctcccagcccacttcgtca

SEQ ID NO: 1052 - RNA, 91 nt, Homo sapiens
  source 1..91: mol_type = genomic RNA
ctgtgtgtgatgagctggcagtgtattgttagctggttgaatatgtgaatggcatcggctaacatgcaactgctgtcttattgcatataca

SEQ ID NO: 1053 - RNA, 97 nt, Homo sapiens
  source 1..97: mol_type = genomic RNA
tgacctgaatcaggtaggcagtgtattgttagctggctgcttgggtcaagtcagcagccacaactaccctgccacttgcttctggataaattcttct

SEQ ID NO: 1054 - RNA, 92 nt, Homo sapiens
  source 1..92: mol_type = genomic RNA
gctgggatgtgtcaggtaggcagtgtattgctagcggctgttaatgattttaacagttgctagttgcactcctctctgttgcattcagaagc

SEQ ID NO: 1055 - RNA, 91 nt, Homo sapiens
  source 1..91: mol_type = genomic RNA
aaacgatactaaactgtttttgcgatgtgttcctaatatgcactataaatatattgggaacattttgcatgtatagttttgtatcaatata

SEQ ID NO: 1056 - RNA, 100 nt, Homo sapiens
  source 1..100: mol_type = genomic RNA
ccaaagaaagatgctaaactatttttgcgatgtgttcctaatatgtaatataaatgtattggggacattttgcattcatagttttgtatcaataatatgg

SEQ ID NO: 1057 - RNA, 78 nt, Homo sapiens
  source 1..78: mol_type = genomic RNA
gcagaattatttttgcaatatgttcctgaatatgtaatataagtgtattgggatcattttgcatccatagttttgtat

SEQ ID NO: 1058 - RNA, 72 nt, Homo sapiens
  source 1..72: mol_type = genomic RNA
cttgggaatggcaaggaaaccgttaccattactgagtttagtaatggtaatggttctcttgctatacccaga

SEQ ID NO: 1059 - RNA, 68 nt, Homo sapiens
  source 1..68: mol_type = genomic RNA
tgggtatagcaagagaaccattaccattactaaactcagtaatggtaacggtttccttgccattccca

SEQ ID NO: 1060 - RNA, 85 nt, Homo sapiens
  source 1..85: mol_type = genomic RNA
gctaagcacttacaactgtttgcagaggaaactgagactttgtaactatgtctcagtctcatctgcaaagaagtaagtgctttgc

SEQ ID NO: 1061 - RNA, 115 nt, Homo sapiens
  source 1..115: mol_type = genomic RNA
tctgtttatcaccagatcctagaaccctatcaatattgtctctgctgtgtaaatagttctgagtagtgcaatattgcttatagggttttggtgtttggaaagaacaatgggcagg

SEQ ID NO: 1062 - RNA, 96 nt, Homo sapiens
  source 1..96: mol_type = genomic RNA
tccctggcgtgagggtatgtgcctttggactacatcgtggaagccagcaccatgcagtccatgggcatatacacttgcctcaaggcctatgtcatc

SEQ ID NO: 1063 - RNA, 84 nt, Homo sapiens
  source 1..84: mol_type = genomic RNA
gtgtgtgtatatgtgtgttgcatgtgtgtatatgtgtgtatatatgtacacatacacatacacgcaacacacatatatacatgc

SEQ ID NO: 1064 - RNA, 76 nt, Homo sapiens
  source 1..76: mol_type = genomic RNA
gagggggaagacgggaggaaagaagggagtggttccatcacgcctcctcactcctctcctcccgtcttctcctctc

SEQ ID NO: 1065 - RNA, 79 nt, Homo sapiens
  source 1..79: mol_type = genomic RNA
agcctcgtcaggctcagtcccctcccgataaacccctaaatagggactttcccggggggtgaccctggcttttttggcg

SEQ ID NO: 1066 - RNA, 73 nt, Homo sapiens
  source 1..73: mol_type = genomic RNA
acttggagagaggctggccgtgatgaattcgattcatcaaagcgagtcatacacggctctcctctcttttagt

SEQ ID NO: 1067 - RNA, 68 nt, Homo sapiens
  source 1..68: mol_type = genomic RNA
gcatcctgtactgagctgccccgaggcccttcatgctgcccagctcggggcagctcagtacaggatac

SEQ ID NO: 1068 - RNA, 80 nt, Homo sapiens
  source 1..80: mol_type = genomic RNA
ggtacttgaagagtggttatccctgctgtgttcgcttaatttatgacgaatcatacagggacatccagtttttcagtatc

SEQ ID NO: 1069 - RNA, 84 nt, Homo sapiens
  source 1..84: mol_type = genomic RNA
ttggtacttggagagtggttatccctgtcctgttcgttttgctcatgtcgaatcgtacagggtcatccactttttcagtatcaa

SEQ ID NO: 1070 - RNA, 83 nt, Homo sapiens
  source 1..83: mol_type = genomic RNA
gagaatcatctctcccagataatggcactctcaaacaagtttccaaattgtttgaaaggctatttcttggtcagatgactctc

SEQ ID NO: 1071 - RNA, 84 nt, Homo sapiens
  source 1..84: mol_type = genomic RNA
gtggcagcttggtggtcgtatgtgtgacgccatttacttgaacctttaggagtgacatcacatatacggcagctaaactgctac

SEQ ID NO: 1072 - RNA, 128 nt, Homo sapiens
  source 1..128: mol_type = genomic RNA
tggaggccttgctggtttggaaagttcattgttcgacaccatggatctccaggtgggtcaagtttagagatgcaccaacctggaggactccatgctgttgagctgttcacaagcagcggacacttcca

SEQ ID NO: 1073 - RNA, 84 nt, Homo sapiens
  source 1..84: mol_type = genomic RNA
ttgacttagctgggtagtggggaacccttccatgaggagtagaacactccttatgcaagattcccttctacctggctgggttgg

SEQ ID NO: 1074 - RNA, 116 nt, Homo sapiens
  source 1..116: mol_type = genomic RNA
caactacagccactactacaggaccatcgaggacctgcgggacaagattcttggtgccaccattgagaacgccaggattgtcctgcagatcaacaatgctcaactggctgcagatg

SEQ ID NO: 1075 - RNA, 89 nt, Homo sapiens
  source 1..89: mol_type = genomic RNA
ctggcctccagggctttgtacatggtaggctttcattcattcgtttgcacattcggtgaaggtctactgtgtgccaggccctgtgccag

SEQ ID NO: 1076 - RNA, 81 nt, Homo sapiens
  source 1..81: mol_type = genomic RNA
gatactcgaaggagaggttgtccgtgttgtcttctctttatttatgatgaaacatacacgggaaacctcttttttagtatc

SEQ ID NO: 1077 - RNA, 82 nt, Homo sapiens
  source 1..82: mol_type = genomic RNA
tggtacctgaaaagaagttgcccatgttattttcgctttatatgtgacgaaacaaacatggtgcacttctttttcggtatca

SEQ ID NO: 1078 - RNA, 102 nt, Homo sapiens
  source 1..102: mol_type = genomic RNA
cccaagtcaggtactcgaatggaggttgtccatggtgtgttcattttatttatgatgagtattacatggccaatctcctttcggtactcaattcttcttggg

SEQ ID NO: 1079 - RNA, 112 nt, Homo sapiens
  source 1..112: mol_type = genomic RNA
ccaccccggtcctgctcccgccccagcagcacactgtggtttgtacggcactgtggccacgtccaaaccacactgtggtgttagagcgagggtgggggaggcaccgccgagg

SEQ ID NO: 1080 - RNA, 124 nt, Homo sapiens
  source 1..124: mol_type = genomic RNA
aaccctccttgggaagtgaagctcaggctgtgatttcaagccagggggcgtttttctataactggatgaaaagcacctccagagcttgaagctcacagtttgagagcaatcgtctaaggaagtt

SEQ ID NO: 1081 - RNA, 122 nt, Homo sapiens
  source 1..122: mol_type = genomic RNA
gccctgtcccctgtgccttgggcgggcggctgttaagacttgcagtgatgtttaactcctctccacgtgaacatcacagcaagtctgtgctgcttcccgtccctacgctgcctgggcagggt

SEQ ID NO: 1082 - RNA, 73 nt, Homo sapiens
  source 1..73: mol_type = genomic RNA
ggaagcagcacagacttgctgtgatgttcacgtggagaggagttaaacatcactgcaagtcttaacagccgcc

SEQ ID NO: 1083 - RNA, 84 nt, Homo sapiens
  source 1..84: mol_type = genomic RNA
gctccccctctctaatccttgctacctgggtgagagtgctgtctgaatgcaatgcacctgggcaaggattctgagagcgagagc

SEQ ID NO: 1084 - RNA, 79 nt, Homo sapiens
  source 1..79: mol_type = genomic RNA
ccccctctctaatccttgctacctgggtgagagtgctttctgaatgcagtgcacccaggcaaggattctgcaaggggga

SEQ ID NO: 1085 - RNA, 84 nt, Homo sapiens
  source 1..84: mol_type = genomic RNA
gctcttcctctctaatcctttgtccctgggtgagagtgctttctgaatgcaatgcacccgggcaaggattctgagagggtgagc

SEQ ID NO: 1086 - RNA, 86 nt, Homo sapiens
  source 1..86: mol_type = genomic RNA
tgctccccctctctaatccttgctatctgggtgctagtgctggctcaatgcaatgcacctgggcaaggattcagagagggggagct

SEQ ID NO: 1087 - RNA, 71 nt, Homo sapiens
  source 1..71: mol_type = genomic RNA
tgccctagcagcgggaacagttctgcagtgagcgatcggtgctctggggtattgtttccgctgccagggta

SEQ ID NO: 1088 - RNA, 83 nt, Homo sapiens
  source 1..83: mol_type = genomic RNA
gctgctgttgggagaccctggtctgcactctatctgtattcttactgaagggagtgcagggcagggtttcccatacagagggc

SEQ ID NO: 1089 - RNA, 84 nt, Homo sapiens
  source 1..84: mol_type = genomic RNA
gatgcacccagtgggggagccaggaagtattgatgtttctgccagtttagcgtcaacacttgctggtttcctctctggagcatc

SEQ ID NO: 1090 - RNA, 124 nt, Homo sapiens
  source 1..124: mol_type = genomic RNA
gccaccaccatcagccatactatgtgtagtgccttattcaggaaggtgttacttaatagattaatatttgtaaggcacccttctgagtagagtaatgtgcaacatggacaacatttgtggtggc

SEQ ID NO: 1091 - RNA, 94 nt, Homo sapiens
  source 1..94: mol_type = genomic RNA
gtgctgtgtgtagtgcttcacttcaagaagtgccatgcatgtgtctagaaatatgttttgcaccttttggagtgaaataatgcacaacagatac

SEQ ID NO: 1092 - RNA, 115 nt, Homo sapiens
  source 1..115: mol_type = genomic RNA
ccaccttcagctgagtgtagtgccctactccagagggcgtcactcatgtaaactaaaacatgattgtagccttttggagtagagtaatacacatcacgtaacgcatatttggtgg

SEQ ID NO: 1093 - RNA, 94 nt, Homo sapiens
  source 1..94: mol_type = genomic RNA
catgctgtgtgtggtaccctactgcagacagtggcaatcatgtataattaaaaatgattggtacgtctgtgggtagagtactgcatgacacatg

SEQ ID NO: 1094 - RNA, 91 nt, Homo sapiens
  source 1..91: mol_type = genomic RNA
catgctgtgtgtggtaccctactgcagacagtggcaatcatgtataattaaaaatgattggtacgtctgtgggtagagtactgcatgacac

SEQ ID NO: 1095 - RNA, 75 nt, Homo sapiens
  source 1..75: mol_type = genomic RNA
gtggtaccctactgcagacgtggcaatcatgtataattaaaaatgattggtacgtctgtgggtagagtactgcat

SEQ ID NO: 1096 - RNA, 74 nt, Homo sapiens
  source 1..74: mol_type = genomic RNA
gtggtgtcctactcaggagagtggcaatcacatgtaattaggtgtgattgaaacctctaagagtggagtaacac

SEQ ID NO: 1097 - RNA, 87 nt, Homo sapiens
  source 1..87: mol_type = genomic RNA
caatagacacccatcgtgtcttttgctctgcagtcagtaaatatttttttgtgaatgtgtagcaaaagacagaatggtggtccattg

SEQ ID NO: 1098 - RNA, 87 nt, Homo sapiens; identical to SEQ ID NO: 1097
  source 1..87: mol_type = genomic RNA

SEQ ID NO: 1099 - RNA, 84 nt, Homo sapiens
  source 1..84: mol_type = genomic RNA
tctcagtctgtggcactcagccttgagggcactttctggtgccagaatgaaagtgctgtcatagctgaggtccaatgactgagg

SEQ ID NO: 1100 - RNA, 98 nt, Homo sapiens
  source 1..98: mol_type = genomic RNA
ggtacttctcagtctgtggcactcagccttgagggcactttctggtgccagaatgaaagtgctgtcatagctgaggtccaatgactgaggcgagcacc

SEQ ID NO: 1101 - RNA, 129 nt, Homo sapiens
  source 1..129: mol_type = genomic RNA
gggatgccacattcagccattcagcgtacagtgcctttcacagggaggtgtcatttatgtgaactaaaatataaatttcacctttctgagaagggtaatgtacagcatgcactgcatatgtggtgtccc

SEQ ID NO: 1102 - RNA, 127 nt, Homo sapiens
  source 1..127: mol_type = genomic RNA
ggatgccacattcagccattcagtgtgcagtgcctttcacagggaggtgtcatttatgtgaactaaaatataaatttcacctttctgagaagggtaatgtacagcatgcactgcatatgtggtgtcc

SEQ ID NO: 1103 - RNA, 84 nt, Homo sapiens
  source 1..84: mol_type = genomic RNA
gtgtacagtgcctttcacaaggaggtgtcatttatgtgaactaaaatataaatgtcacctttttgagaggagtaatgtacagca

SEQ ID NO: 1104 - RNA, 84 nt, Homo sapiens
  source 1..84: mol_type = genomic RNA
gcgtacagtgcctttctcaaggaggtgtcgtttatgtgaactaaaatataaatttcacctttctgagaagagtaatgtacagca

SEQ ID NO: 1105 - RNA, 98 nt, Homo sapiens
  source 1..98: mol_type = genomic RNA
aacatgttgtctgtggtaccctactctggagagtgacaatcatgtataattaaatttgattgacacttctgtgagtagagtaacgcatgacacgtacg

SEQ ID NO: 1106 - RNA, 88 nt, Homo sapiens
  source 1..88: mol_type = genomic RNA
gttgtctgtggtaccctactctggagagtgacaatcatgtataactaaatttgattgacacttctgtgagtagagtaacgcatgacac

SEQ ID NO: 1107 - RNA, 88 nt, Homo sapiens; identical to SEQ ID NO: 1106
  source 1..88: mol_type = genomic RNA

SEQ ID NO: 1108 - RNA, 80 nt, Homo sapiens
  source 1..80: mol_type = genomic RNA
catgtggtactcttctcaagagggaggcaatcatgtgtaattagatatgattgacacctctgtgagtggagtaacacatg

SEQ ID NO: 1109 - RNA, 83 nt, Homo sapiens
  source 1..83: mol_type = genomic RNA
tctcatgcagtcattctccaaaagaaagcactttctgttgtctgaaagcagagtgccttcttttggagcgttactgtttgaga

SEQ ID NO: 1110 - RNA, 83 nt, Homo sapiens; identical to SEQ ID NO: 1109
  source 1..83: mol_type = genomic RNA

SEQ ID NO: 1111 - RNA, 90 nt, Homo sapiens
  source 1..90: mol_type = genomic RNA
tctcaggctgtgaccttctcgaggaaagaagcactttctgttgtctgaaagaaaagaaagtgcttcctttcagagggttacggtttgaga

SEQ ID NO: 1112 - RNA, 90 nt, Homo sapiens
  source 1..90: mol_type = genomic RNA
tctcaggttgtgaccttctcgaggaaagaagcactttctgttgtctgaaagaaaagaaagtgcttcctttcagagggttacggtttgaga

SEQ ID NO: 1113 - RNA, 90 nt, Homo sapiens
  source 1..90: mol_type = genomic RNA
tctcaggctgtgaccatctggaggtaagaagcactttctgttttgtgaaagaaaagaaagtgcttcctttcagagggttactctttgaga

SEQ ID NO: 1114 - RNA, 85 nt, Homo sapiens
  source 1..85: mol_type = genomic RNA
tctcatgatgtgaccatctggaggtaagaagcactttgtgttttgtgaaagaaagtgcttcctttcagagggttactctttgaga

SEQ ID NO: 1115 - RNA, 87 nt, Homo sapiens
  source 1..87: mol_type = genomic RNA
tctcaggcagtgaccctctagatggaagcactgtctgttgtataaaagaaaagatcgtgcatccctttagagtgttactgtttgaga

SEQ ID NO: 1116 - RNA, 67 nt, Homo sapiens
  source 1..67: mol_type = genomic RNA
gtgaccctctagatggaagcactgtctgttgtctaagaaaagatcgtgcatccctttagagtgttac

SEQ ID NO: 1117 - RNA, 95 nt, Homo sapiens
  source 1..95: mol_type = genomic RNA
gaagatctcaggcagtgaccctctagatggaagcactgtctgttgtctaagaaaagatcgtgcatccttttagagtgttactgtttgagaaaatc

SEQ ID NO: 1118 - RNA, 85 nt, Homo sapiens
  source 1..85: mol_type = genomic RNA
tctcaagctgtgactgcaaagggaagccctttctgttgtctgaaagaagagaaagcgcttccctttgctggattacggtttgaga

SEQ ID NO: 1119 - RNA, 87 nt, Homo sapiens
  source 1..87: mol_type = genomic RNA
tctcaagctgtgggtctgcaaagggaagccctttctgttgtctaaaagaagagaaagcgcttccctttgctggattacggtttgaga

SEQ ID NO: 1120 - RNA, 83 nt, Homo sapiens
  source 1..83: mol_type = genomic RNA
tcatgctgtggccctccagagggaagcgctttctgttgtctgaaagaaaacaaagcgctcccctttagaggtttacggtttga

SEQ ID NO: 1121 - RNA, 101 nt, Homo sapiens
  source 1..101: mol_type = genomic RNA
gcgagaagatctcatgctgtgactctctggagggaagcactttctgttgtctgaaagaaaacaaagcgcttctctttagagtgttacggtttgagaaaagc

SEQ ID NO: 1122 - RNA, 87 nt, Homo sapiens
  source 1..87: mol_type = genomic RNA
tcccatgctgtgaccctctagagggaagcactttctgttgtctgaaagaaaccaaagcgcttccctttggagcgttacggtttgaga

SEQ ID NO: 1123 - RNA, 88 nt, Homo sapiens
  source 1..88: mol_type = genomic RNA
tctcaggctgtgaccctctagagggaagcgctttctgttggctaaaagaaaagaaagcgcttcccttcagagtgttaacgctttgaga

SEQ ID NO: 1124 - RNA, 87 nt, Homo sapiens
  source 1..87: mol_type = genomic RNA
tctcatgctgtgaccctctagagggaagcactttctcttgtctaaaagaaaagaaagcgcttctctttagaggattactctttgaga

SEQ ID NO: 1125 - RNA, 85 nt, Homo sapiens
  source 1..85: mol_type = genomic RNA
ctcaggctgtgacactctagagggaagcgctttctgttgtctgaaagaaaggaaagtgcatccttttagagtgttactgtttgag

SEQ ID NO: 1126 - RNA, 87 nt, Homo sapiens
  source 1..87: mol_type = genomic RNA
tctcaggctgtgtccctctacagggaagcgctttctgttgtctgaaagaaaggaaagtgcatccttttagagtgttactgtttgaga

SEQ ID NO: 1127 - RNA, 81 nt, Homo sapiens
  source 1..81: mol_type = genomic RNA
catgctgtgaccctctagagggaagcgctttctgttgtctgaaagaaaagaaagtgcatccttttagaggtttactgtttg

SEQ ID NO: 1128 - RNA, 87 nt, Homo sapiens
  source 1..87: mol_type = genomic RNA
tctcagcctgtgaccctctagagggaagcgctttctgttgtctgaaagaaaagaaagtgcatctttttagaggattacagtttgaga

SEQ ID NO: 1129 - RNA, 88 nt, Homo sapiens
  source 1..88: mol_type = genomic RNA
tcccatgctgtgaccctccaaagggaagcgctttctgtttgttttctcttaaacaaagtgcctccctttagagtgttaccgtttggga

SEQ ID NO: 1130 - RNA, 84 nt, Homo sapiens
  source 1..84: mol_type = genomic RNA
tctcatgcagtcattctccaaaagggagcactttctgtttgaaagaaaacaaagtgcctccttttagagtgttactgtttgaga

SEQ ID NO: 1131 - RNA, 85 nt, Homo sapiens
  source 1..85: mol_type = genomic RNA
ctcaggctgtgaccctccagagggaagtactttctgttgtctgagagaaaagaaagtgcttccctttggactgtttcggtttgag

SEQ ID NO: 1132 - RNA, 61 nt, Homo sapiens
  source 1..61: mol_type = genomic RNA
ccctctacagggaagcgctttctgttgtctgaaagaaaagaaagtgcttccttttagaggg

SEQ ID NO: 1133 - RNA, 87 nt, Homo sapiens
  source 1..87: mol_type = genomic RNA
tctcaggctgtcgtcctctagagggaagcactttctgttgtctgaaagaaaagaaagtgcttccttttagagggttaccgtttgaga

SEQ ID NO: 1134 - RNA, 87 nt, Homo sapiens
  source 1..87: mol_type = genomic RNA
tctcaagctgtgagtctacaaagggaagccctttctgttgtctaaaagaaaagaaagtgcttctctttggtgggttacggtttgaga

SEQ ID NO: 1135 - RNA, 87 nt, Homo sapiens
  source 1..87: mol_type = genomic RNA
tctcctgctgtgaccctcaagatggaagcagtttctgttgtctgaaaggaaagaaagtgcttcctttttgagggttactgtttgaga

SEQ ID NO: 1136 - RNA, 87 nt, Homo sapiens
  source 1..87: mol_type = genomic RNA
tctcaggctgtgaccctctaaagggaagcgctttctgtggtcagaaagaaaagcaagtgcttccttttagagggttaccgtttggga

SEQ ID NO: 1137 - RNA, 90 nt, Homo sapiens
  source 1..90: mol_type = genomic RNA
tcccatgctgtgaccctctagaggaagcactttctgtttgttgtctgagaaaaaacaaagtgcttccctttagagtgttaccgtttggga

SEQ ID NO: 1138 - RNA, 88 nt, Homo sapiens
  source 1..88: mol_type = genomic RNA
tcccatgctgtgaccctctagaggaagcactttctgtttgttgtctgagaaaaaacaaagtgcttccctttagagttactgtttggga

SEQ ID NO: 1139 - RNA, 87 nt, Homo sapiens
  source 1..87: mol_type = genomic RNA
tctcaggctgtgaccctccaaagggaagaactttctgttgtctaaaagaaaagaacgcacttccctttagagtgttaccgtgtgaga

SEQ ID NO: 1140 - RNA, 87 nt, Homo sapiens
  source 1..87: mol_type = genomic RNA
tctcgggctgtgactctccaaagggaagaattttctcttgtctaaaagaaaagaacgcacttccctttagagtgttaccgtgtgaga

SEQ ID NO: 1141 - RNA, 87 nt, Homo sapiens
  source 1..87: mol_type = genomic RNA
tctcaggctgtgtccctctagagggaagcgctttctgttgtctgaaagaaaagaaaatggttccctttagagtgttacgctttgaga

SEQ ID NO: 1142 - RNA, 87 nt, Homo sapiens
  source 1..87: mol_type = genomic RNA
tctcatgctgtgaccctctagagggaagcgctttctgttgtctgaaagaaaagaacgcgcttccctatagagggttaccctttgaga

SEQ ID NO: 1143 - RNA, 87 nt, Homo sapiens
  source 1..87: mol_type = genomic RNA
tctcatgctgtgaccctacaaagggaagcactttctcttgtccaaaggaaaagaaggcgcttccctttggagtgttacggtttgaga

SEQ ID NO: 1144 - RNA, 85 nt, Homo sapiens
  source 1..85: mol_type = genomic RNA
ctcaagctgtgactctccagagggatgcactttctcttatgtgaaaaaaaagaaggcgcttccctttagagcgttacggtttggg

SEQ ID NO: 1145 - RNA, 85 nt, Homo sapiens
  source 1..85: mol_type = genomic RNA
ctcaggctgtgaccctctagagggaagcactttctgttgcttgaaagaagagaaagcgcttccttttagaggattactctttgag

SEQ ID NO: 1146 - RNA, 65 nt, Homo sapiens
  source 1..65: mol_type = genomic RNA
gtgaccctctagagggaagcactttctgttgaaagaaaagaacatgcatcctttcagagggttac

SEQ ID NO: 1147 - RNA, 83 nt, Homo sapiens
  source 1..83: mol_type = genomic RNA
tcaggctgtgaccctcttgagggaagcactttctgttgtctgaaagaagagaaagtgcttccttttagaggcttactgtctga

SEQ ID NO: 1148 - RNA, 85 nt, Homo sapiens
  source 1..85: mol_type = genomic RNA
tctcaagctgtgactgcaaagggaagccctttctgttgtctaaaagaaaagaaagtgcttccctttggtgaattacggtttgaga

SEQ ID NO: 1149 - RNA, 91 nt, Homo sapiens
  source 1..91: mol_type = genomic RNA
cgacttgctttctctcctccatgccttgagtgtaggaccgttggcatcttaattaccctcccacacccaaggcttgcaaaaaagcgagcct

SEQ ID NO: 1150 - RNA, 78 nt, Homo sapiens
  source 1..78: mol_type = genomic RNA
atacttgaggagaaattatccttggtgtgttcgctttatttatgatgaatcatacaaggacaatttctttttgagtat

SEQ ID NO: 1151 - RNA, 84 nt, Homo sapiens
  source 1..84: mol_type = genomic RNA
acgtcagggaaaggattctgctgtcggtcccactccaaagttcacagaatgggtggtgggcacagaatctggactctgcttgtg

SEQ ID NO: 1152 - RNA, 97 nt, Homo sapiens
  source 1..97: mol_type = genomic RNA
cagatctcagacatctcggggatcatcatgtcacgagataccagtgtgcacttgtgacagattgataactgaaaggtctgggagccactcatcttca

SEQ ID NO: 1153 - RNA, 78 nt, Homo sapiens
  source 1..78: mol_type = genomic RNA
tacttaatgagaagttgcccgtgtttttttcgctttatttgtgacgaaacattcgcggtgcacttctttttcagtatc

SEQ ID NO: 1154 - RNA, 91 nt, Homo sapiens
  source 1..91: mol_type = genomic RNA
attttcatcacctagggatcttgttaaaaagcagattctgattcagggaccaagattctgcatttttagcaagttctcaagtgatgctaat

SEQ ID NO: 1155 - RNA, 78 nt, Homo sapiens
  source 1..78: mol_type = genomic RNA
ggaattttgttaaaatgcagaatccatttctgtagctctgagactagacctgaggttgtgcatttctaacaaagtgcc

SEQ ID NO: 1156 - RNA, 106 nt, Homo sapiens
  source 1..106: mol_type = genomic RNA
cccagcctggcacattagtaggcctcagtaaatgtttattagatgaataaatgaatgactcatcagcaaacatttattgtgtgcctgctaaagtgagctccacagg

SEQ ID NO: 1157 - RNA, 97 nt, Homo sapiens
  source 1..97: mol_type = genomic RNA
tgcagggaggtattaagttggtgcaaaagtaattgtgatttttgccattaaaagtaacgacaaaactggcaattacttttgcaccaaacctggtatt

SEQ ID NO: 1158 - RNA, 97 nt, Homo sapiens
  source 1..97: mol_type = genomic RNA
tgtgatgtgtattaggtttgtgcaaaagtaattggggttttttgccgttaaaagtaatggcaaaactggcaattacttttgcaccaaactaatataa

SEQ ID NO: 1159 - RNA, 97 nt, Homo sapiens
  source 1..97: mol_type = genomic RNA
cctagaatgttattaggtcggtgcaaaagtaattgcgagttttaccattactttcaatggcaaaactggcaattacttttgcaccaacgtaatactt

SEQ ID NO: 1160 - RNA, 97 nt, Homo sapiens
  source 1..97: mol_type = genomic RNA
ctttattagtctggtgcaaaagaaactgtggtttttgccattacttttacaggcaaaaaccacaattacttttgcaccaacctaatataacttgttt

SEQ ID NO: 1161 - RNA, 97 nt, Homo sapiens
  source 1..97: mol_type = genomic RNA
ttttattaggttggtgcaaaagaaactgtggtttttgccattactttcaatggcaaaaaccacaattacttttgcaccaacctaaatcttccctctc

SEQ ID NO: 1162 - RNA, 84 nt, Homo sapiens
  source 1..84: mol_type = genomic RNA
atgttggtgcaaaagtaattgtggattttgctattacttgtatttatttgtaatgcaaaacccgcaattagttttgcaccaacc

SEQ ID NO: 1163 - RNA, 88 nt, Homo sapiens
  source 1..88: mol_type = genomic RNA
gtattaggttggtgcaaaagttattgtggtttttgctatttttttttaatggcaaaaaccggcaattacttttgcactaacctagtag

SEQ ID NO: 1164 - RNA, 82 nt, Homo sapiens
  source 1..82: mol_type = genomic RNA
ctgttaggttggtgcaaaagtaattgtggtttttgaaagtaacttggcgaaaacgacaatgacttttgcaccaatctaatac

SEQ ID NO: 1165 - RNA, 70 nt, Homo sapiens
  source 1..70: mol_type = genomic RNA
gcagtttttgccattaagttgcggtttttgccattataatggcaaaaactgcaattactttcacacctgc

SEQ ID NO: 1166 - RNA, 67 nt, Homo sapiens
  source 1..67: mol_type = genomic RNA
tgtgcaaaagtaattgtggtttttgtcatttaaaagtaatggcaaaaactgcaattactttcacacc

SEQ ID NO: 1167 - RNA, 66 nt, Homo sapiens
  source 1..66: mol_type = genomic RNA
gtgcaaaggtaattgtggtttctgcttttaaaggtaatggcaaatattacatttacttttgcacca

SEQ ID NO: 1168 - RNA, 64 nt, Homo sapiens
  source 1..64: mol_type = genomic RNA
tgcaaaggtaattgtggtttctgccattgaaagtaaaggcaagaacctcaattacctttgcagc

SEQ ID NO: 1169 - RNA, 76 nt, Homo sapiens
  source 1..76: mol_type = genomic RNA
aggttggtgcaaaagtgattgcagtgtttgccaataaaagtaatgacaaaaactgcagttacttttgcaccagccc

SEQ ID NO: 1170 - RNA, 88 nt, Homo sapiens
  source 1..88: mol_type = genomic RNA
gtattaggttggtgcaaaggtaattgcagtttttcccatttaaaatatggaaaaaaaaatcacaattacttttgcatcaacctaataa

SEQ ID NO: 1171 - RNA, 72 nt, Homo sapiens
  source 1..72: mol_type = genomic RNA
attggtgtaaaagtaattgcaggttatgccattaaaagtaatggtaaaaactgcaattacttttacactaac

SEQ ID NO: 1172 - RNA, 92 nt, Homo sapiens
  source 1..92: mol_type = genomic RNA
aaggtattaggttggtgcaaaagtaattgcagtttttgctattacttttaatggtaaaaactgcaattacttttacaccaacctaatattta

SEQ ID NO: 1173 - RNA, 57 nt, Homo sapiens
  source 1..57: mol_type = genomic RNA
gtgcaaaagtaactgcggtttttgagaagtaattgaaaaccgcaattacttttgcag

SEQ ID NO: 1174 - RNA, 97 nt, Homo sapiens
  source 1..97: mol_type = genomic RNA
ggtcggtgcaaaagtaattgctgtttttgccattaaaaataatggcattaaaagtaatggcaaaaacggcaatgacttttgtaccaatctaatatct

SEQ ID NO: 1175 - RNA, 74 nt, Homo sapiens
  source 1..74: mol_type = genomic RNA
agttggtgcaaaagtaattgcggtttttgccgtcgaaaataatggcaaaaactgcagttacttttgtaccaatg

SEQ ID NO: 1176 - RNA, 83 nt, Homo sapiens
  source 1..83: mol_type = genomic RNA
cattaggttggtgcaaaaggcattgtggtttttgcctataaaagtaatggcaaaaaccgcaattccttttgcaccaacctaat

SEQ ID NO: 1177 - RNA, 96 nt, Homo sapiens
  source 1..96: mol_type = genomic RNA
aactattcttaggttgatgcagaagtaactacggtttttgcagttgaaagtaatggcaaagaccgtgactacttttgcaacagcctaatagtttct

SEQ ID NO: 1178 - RNA, 96 nt, Homo sapiens
  source 1..96: mol_type = genomic RNA
accaattcctaggttggtgcaaaagtaattgcggtctttgtcattaaaaccaataacaaaaaccacaattactttttactgacctaaagattaatt

SEQ ID NO: 1179 - RNA, 58 nt, Homo sapiens
  source 1..58: mol_type = genomic RNA
gaaagtaattgctgtttttgccattactttcagtggcaaaaactgcaattacttttgc

SEQ ID NO: 1180 - RNA, 57 nt, Homo sapiens
  source 1..57: mol_type = genomic RNA
aaaagtaattgcagtttttgctgttgaacgtagtggtaaaactgcagttatttttgc

SEQ ID NO: 1181 - RNA, 58 nt, Homo sapiens
  source 1..58: mol_type = genomic RNA
aaaagtaattgcgggttttgccgttgcttttaatggtaaaacccacaattatgtttgt

SEQ ID NO: 1182 - RNA, 58 nt, Homo sapiens
  source 1..58: mol_type = genomic RNA
aaaagttattgcggttttggctgccaaaagaaatggccaaaaccgcagtaacttttgt

SEQ ID NO: 1183 - RNA, 54 nt, Homo sapiens
  source 1..54: mol_type = genomic RNA
aaaagtaattgcggtttttgctattggttttaatggcagttacttttgcaccag

SEQ ID NO: 1184 - RNA, 62 nt, Homo sapiens
  source 1..62: mol_type = genomic RNA
aaaagtacttgcggatttgccatcacctttacctttaatggcaaaactgcagttacttttgc

SEQ ID NO: 1185 - RNA, 65 nt, Homo sapiens
  source 1..65: mol_type = genomic RNA
taggtcggtgcaaaagtcatcacggtttttaccattaaaaccgcgatgacttttgcatcaaccta

SEQ ID NO: 1186 - RNA, 73 nt, Homo sapiens
  source 1..73: mol_type = genomic RNA
gattggtgcagaagtaattgcggttttgccatggaaagtaatggcaaaaaccgtaattacttttgtaccaacc

SEQ ID NO: 1187 - RNA, 97 nt, Homo sapiens
  source 1..97: mol_type = genomic RNA
cagactatatatttaggttggcgcaaaagtaattgtggttttggcctttattttcaatggcaagaacctcagttgcttttgtgccaacctaatactt

SEQ ID NO: 1188 - RNA, 97 nt, Homo sapiens
  source 1..97: mol_type = genomic RNA
cattggcatctattaggttggtgcaaaagtaattgcggtttttgccattactttcagtagcaaaaatctcaattacttttgcaccaacttaatactt

SEQ ID NO: 1189 - RNA, 97 nt, Homo sapiens
  source 1..97: mol_type = genomic RNA
aaacaagttatattaggttggtgcaaaagtaattgtggtttttgcctgtaaaagtaatggcaaaaaccacagtttcttttgcaccagactaataaag

SEQ ID NO: 1190 - RNA, 97 nt, Homo sapiens
  source 1..97: mol_type = genomic RNA
gagagggaagatttaggttggtgcaaaagtaattgtggtttttgccattgaaagtaatggcaaaaaccacagtttcttttgcaccaacctaataaaa

SEQ ID NO: 1191 - RNA, 88 nt, Homo sapiens
  source 1..88: mol_type = genomic RNA
ttattaggttggtacaaaagcaatcgcggtttttgctattacttttaaaggcaaaaactgagactacttttgcaccaacctgatagaa

SEQ ID NO: 1192 - RNA, 84 nt, Homo sapiens
  source 1..84: mol_type = genomic RNA
attaggttggtgcaaaagtaatcacagtttttgacattactttcaaagacaaaaactgtaattacttttggaccaacctaatag

SEQ ID NO: 1193 - RNA, 98 nt, Homo sapiens
  source 1..98: mol_type = genomic RNA
taataactattaggttggtgcgaacataattgcagtttttatcattacttttaatggcaaaaactgtaattacttttgcaccaacctaatattttagt

SEQ ID NO: 1194 - RNA, 87 nt, Homo sapiens
  source 1..87: mol_type = genomic RNA
attaggttggtgcaaacctaattgcaatttttgcagtttttttaagtaattgcaaaaactgtaattacttttgcaccaacctaatac

SEQ ID NO: 1195 - RNA, 105 nt, Homo sapiens
  source 1..105: mol_type = genomic RNA
gagttctaacgtattaggttggtgcaaaagtaatagtggtttttgccattaaaagtaatgacaaaaactgtaattacttttggaacaatattaatagaatttcag

SEQ ID NO: 1196 - RNA, 86 nt, Homo sapiens
  source 1..86: mol_type = genomic RNA
tattaggttgctgcaaaagtaatcatgtttttttccattgtaagtaatgggaaaaactgtaattacttttgtaccaacctaatagc

SEQ ID NO: 1197 - RNA, 89 nt, Homo sapiens
  source 1..89: mol_type = genomic RNA
agttattagattagtgcaaaagtaattgcagtttttgcattacgttctatggcaaaactgtaattacttttgtaccaacataatacttc

SEQ ID NO: 1198 - RNA, 102 nt, Homo sapiens
  source 1..102: mol_type = genomic RNA
tctgtccattaggtgggtgcaaaagtaatcgcggtttttgtcattacttttaatggtaaaaactggaattacttttgcactgacctaatattaagccagata

SEQ ID NO: 1199 - RNA, 88 nt, Homo sapiens
  source 1..88: mol_type = genomic RNA
gtattaggttggtgcaaaagtaatcgcggtttttgtcattactttcaatggcaaacaccacaattacttttgcaccaacctaatataa

SEQ ID NO: 1200 - RNA, 118 nt, Homo sapiens
  source 1..118: mol_type = genomic RNA
tctgattctgcatgtattaggttggtgcaaaagtaatcgcggtttttgtcattgaaagtaatagcaaaaactgcaattacttttgcaccaacctaaaagtagtcactgtcttcagata

SEQ ID NO: 1201 - RNA, 111 nt, Homo sapiens
  source 1..111: mol_type = genomic RNA
gctattaggttggtgcaaaagtaatcgcggtttttgtcattactttaattactttacgtttcattaatgacaaaaaccgcaattacttttgcaccaacctaatacttgcta

SEQ ID NO: 1202 - RNA, 60 nt, Homo sapiens
  source 1..60: mol_type = genomic RNA
acaaaagtaatcgcggtttttgtcattacttttaactgtaaaaaccacggttgcttttgc

SEQ ID NO: 1203 - RNA, 149 nt, Homo sapiens
  source 1..149: mol_type = genomic RNA
cagatggctctgaagtttgcaccctattaggttggtgcaaaagtaattgcggattttgccattaaaagtaatggcaaaaatagcaattatttttgtaccagcctagtatcttttctccttctaccaaactttgtccctgagccatctca

SEQ ID NO: 1204 - RNA, 149 nt, Homo sapiens
  source 1..149: mol_type = genomic RNA
tagatggctccgaagtttgcatcctattagtttggtgcaaaagtaattgcggattttgccattaaaagtaatggcaaaaatagcaattatttttgtaccagcctagtatcttttctccttctaacaaagttcgtccctgatccatctca

SEQ ID NO: 1205 - RNA, 149 nt, Homo sapiens
  source 1..149: mol_type = genomic RNA
cagatggctccgaagtttacatcctattaggtttgtgcaaaagtaattgcggattttgccattaaaagtaatggcaaaaatagcaattatttttgtaccagcctagtatcttttctccttctaccaaactttgtccctgagccatctca

SEQ ID NO: 1206 - RNA, 77 nt, Homo sapiens
  source 1..77: mol_type = genomic RNA
aggttggtgcaaaagtaattgcggattttgccatacttttaacggcaaaaaccacaaatattattgcaccaacctat

SEQ ID NO: 1207 - RNA, 112 nt, Homo sapiens
  source 1..112: mol_type = genomic RNA
gggcagccagtgaatagttagctggtgcaaaagtaattgcggtctttggtattactttcagtggcaaaaactgcattacttttgcaccagcctactagaacgctgagttcag

SEQ ID NO: 1208 - RNA, 116 nt, Homo sapiens
  source 1..116: mol_type = genomic RNA
cttttctcaagtattgctgttaggttggtgcaaaagtacttgcggattttgctttacttttaatggcaaaaaccgcaattatttttgcttcaacctaatatgatgcaaaattggct

SEQ ID NO: 1209 - RNA, 86 nt, Homo sapiens
  source 1..86: mol_type = genomic RNA
tattaggttggtgcaaaagtatttgcgggttttgtcgtagaaagtaatggcaaaaactgcagttacttgtgcaccaaccaaatgct

SEQ ID NO: 1210 - RNA, 86 nt, Homo sapiens
  source 1..86: mol_type = genomic RNA
atattaggttggtgcaaaggtatttgtggtttttgtcattaaagtaatgcaaaagccacaaatacctttgcaccaacctaatatta

SEQ ID NO: 1211 - RNA, 75 nt, Homo sapiens
  source 1..75: mol_type = genomic RNA
aggttggtgcaaaagtaattgtggattttgtcgttaaaaatagcaaaacccgcaattacttttgcaccaacctaa

SEQ ID NO: 1212 - RNA, 114 nt, Homo sapiens
  source 1..114: mol_type = genomic RNA
tggtgaaaatgtgttgattgtaatggttcctattctgatcaataaacatggtttgagcctagttacaatgatctaaaattcacggtccaaaactgcagttacttttgcaccaac

SEQ ID NO: 1213 - RNA, 70 nt, Homo sapiens
  source 1..70: mol_type = genomic RNA
tggtgcaaaagtaattgcggtttttgccattaaaagtaatgcggccaaaactgcagttacttttgcaccc

SEQ ID NO: 1214 - RNA, 84 nt, Homo sapiens
  source 1..84: mol_type = genomic RNA
attaggttggtataaaattaattgcagtttttgtcattactttcaatagcaaaaactgcagttacttttgcaccaatgtaatac

SEQ ID NO: 1215 - RNA, 100 nt, Homo sapiens
  source 1..100: mol_type = genomic RNA
atattaggctggtgcaaaagtaatggcggtttttgccattacttttcatttttaccattaaaagtaatggcaaaaagcatgattactttttcaccaacct

SEQ ID NO: 1216 - RNA, 82 nt, Homo sapiens
  source 1..82: mol_type = genomic RNA
ttgctgcaaaaataattgcagtttttgccattatttttaataattataataatggccaaaactgcagttatttttgcaccaa

SEQ ID NO: 1217 - RNA, 74 nt, Homo sapiens
  source 1..74: mol_type = genomic RNA
agggtggtgcaaaagtgatcgtggtttttgcaattttttaatgacaaaaaccacaattacttttgcaccaacct

SEQ ID NO: 1218 - RNA, 81 nt, Homo sapiens
  source 1..81: mol_type = genomic RNA
attaggatggtgcaaaagtaatgtggtttttttctttacttttaatggcaaagactgcaattacttttgcgccaacctaat

SEQ ID NO: 1219 - RNA, 80 nt, Homo sapiens
  source 1..80: mol_type = genomic RNA
aatactaggtttgagcaaaagtaattgcggttttgccatcatgccaaaagctacagttacttttgcaccagcctaatatt

SEQ ID NO: 1220 - RNA, 74 nt, Homo sapiens
  source 1..74: mol_type = genomic RNA
ggttggtgcaaaagtaactgcggtttttgcctttcaacataatggcaaaacccacaattacttttgcaccaatc

SEQ ID NO: 1221 - RNA, 75 nt, Homo sapiens
  source 1..75: mol_type = genomic RNA
aggttagtgcaaaagtaattgcagtttttgcgttactttcaatcgtaaaaactgcaattactttcacaccaatct

SEQ ID NO: 1222 - RNA, 100 nt, Homo sapiens
  source 1..100: mol_type = genomic RNA
atgccaaatattaggttggcacaaaagtaattgtggcttttgccattaaaagtaatggtaaaaactgcaattactttcgtgccaacctaatatttgtgtg

SEQ ID NO: 1223 - RNA, 110 nt, Homo sapiens
  source 1..110: mol_type = genomic RNA
gcctaaactattaggttggtgcaaaagtaatcactgtttttgccattactctcagtggcaaaaaccgtgattacttttgcaccaacctagtaacaccttcactgtggggg

SEQ ID NO: 1224 - RNA, 97 nt, Homo sapiens
  source 1..97: mol_type = genomic RNA
aagtattaagttggtgcaaaagtaattgagatttttgctactgaaagtaatggcaaaaaccgcaattacttttgcaccaacctaatagatgccaatg

SEQ ID NO: 1225 - RNA, 96 nt, Homo sapiens
  source 1..96: mol_type = genomic RNA
agacatgcaactcaagaatatattgagagctcatccatagttgtcactgtctcaaatcagtgacaactatggatgagctcttaatatatcccaggc

SEQ ID NO: 1226 - RNA, 97 nt, Homo sapiens
  source 1..97: mol_type = genomic RNA
tgatgctttgctggctggtgcagtgcctgagggagtaagagccctgttgttgtaagatagtgtcttactccctcaggcacatctccaacaagtctct

SEQ ID NO: 1227 - RNA, 97 nt, Homo sapiens
  source 1..97: mol_type = genomic RNA
tgatgctttgctggctggtgcagtgcctgagggagtaagagccctgttgttgtcagatagtgtcttactccctcaggcacatctccagcgagtctct

SEQ ID NO: 1228 - RNA, 95 nt, Homo sapiens
  source 1..95: mol_type = genomic RNA
gatgctttgctggctggtgcagtgcctgagggagtaagagtcctgttgttgtaagatagtgtcttactccctcaggcacatctccaacaagtctc

SEQ ID NO: 1229 - RNA, 97 nt, Homo sapiens
  source 1..97: mol_type = genomic RNA
agagacttgttggagatgtgcctgagggagtaagacactatcttacaacaacagggctcttactccctcaggcactgcaccagccagcaaagcatca

SEQ ID NO: 1230 - RNA, 97 nt, Homo sapiens
  source 1..97: mol_type = genomic RNA
agagactcgctggagatgtgcctgagggagtaagacactatctgacaacaacagggctcttactccctcaggcactgcaccagccagcaaagcatca

SEQ ID NO: 1231 - RNA, 96 nt, Homo sapiens
  source 1..96: mol_type = genomic RNA
ggggactgccgggtgaccctggaaatccagagtgggtggggccagtctgaccgtttctaggcgacccactcttggtttccagggttgccctggaaa

SEQ ID NO: 1232 - RNA, 96 nt, Homo sapiens
  source 1..96: mol_type = genomic RNA
agatgtgctctcctggcccatgaaatcaagcgtgggtgagacctggtgcagaacgggaaggcgacccatacttggtttcagaggctgtgagaataa

SEQ ID NO: 1233 - RNA, 96 nt, Homo sapiens
  source 1..96: mol_type = genomic RNA
aaccattcaaatataccacagtttgtttaaccttttgcctgttggttgaagatgcctttcaacaggtgactggttagacaaactgtggtatataca

SEQ ID NO: 1234 - RNA, 68 nt, Homo sapiens
  source 1..68: mol_type = genomic RNA
cttcaattttattttaaaacggtgagattttgttttgtctgagaaaatctcgctgttttagactgagg

SEQ ID NO: 1235 - RNA, 96 nt, Homo sapiens
  source 1..96: mol_type = genomic RNA
acctgagtaacctttgctagtcctgactcagccagtactggtcttagactggtgatgggtcagggttcatattttggcatctctctctgggcatct

SEQ ID NO: 1236 - RNA, 96 nt, Homo sapiens
  source 1..96: mol_type = genomic RNA
ggagtgaactcagatgtggagcactacctttgtgagcagtgtgacccaaggcctgtggacagggtaagctgaacctctgataaaactctgatctat

SEQ ID NO: 1237 - RNA, 95 nt, Homo sapiens
  source 1..95: mol_type = genomic RNA
gatagtaataagaaagatgagctcattgtaatatgagcttcatttatacatttcatattaccattagctcatcttttttattactaccttcaaca

SEQ ID NO: 1238 - RNA, 98 nt, Homo sapiens
  source 1..98: mol_type = genomic RNA
agaatgggcaaatgaacagtaaatttggaggcctggggccctccctgctgctggagaagtgtttgcacgggtgggccttgtctttgaaaggaggtgga

SEQ ID NO: 1239 - RNA, 94 nt, Homo sapiens
  source 1..94: mol_type = genomic RNA
gtgtgtgtgtgtgtgtgtggttattttggtatagtagctctagactctattatagtttcctgagctgctgtaccaaaataccacaaacgggctg

SEQ ID NO: 1240 - RNA, 96 nt, Homo sapiens
  source 1..96: mol_type = genomic RNA
gctccagtaacatcttaaagtaaatatgcaccaaaattacttttggtaaatacagttttggtgcatatttactttaggatgttactggagctccca

SEQ ID NO: 1241 - RNA, 97 nt, Homo sapiens
  source 1..97: mol_type = genomic RNA
cttcatccaccagtcctccaggaacatcaaggatcttaaactttgccagagctacaaaggcaaagtttaagatccttgaagttcctgggggaaccat

SEQ ID NO: 1242 - RNA, 95 nt, Homo sapiens
  source 1..95: mol_type = genomic RNA
agtgaaattgctaggtcatatggtcagtctacttttagagtaattgtgaaactgtttttcaaagtagctgtaccatttgcactccctgtggcaat

SEQ ID NO: 1243 - RNA, 79 nt, Homo sapiens
  source 1..79: mol_type = genomic RNA
agcaaagaagtgtgttgccctctaggaaatgtgtgttgctctgatgtaattaggttgacatacgtttccctggtagcca

SEQ ID NO: 1244 - RNA, 94 nt, Homo sapiens
  source 1..94: mol_type = genomic RNA
cgggcagcgggtgccaggcacggtgtcagcaggcaacatggccgagaggccggggcctccgggcggcgccgtgtccgcgaccgcgtaccctgac

SEQ ID NO: 1245 - RNA, 94 nt, Homo sapiens
  source 1..94: mol_type = genomic RNA
gctaggcgtggtggcgggcgcctgtgatcccaactactcaggaggctggggcagcagaatcgcttgaacccgggaggcgaaggttgcagtgagc

SEQ ID NO: 1246 - RNA, 98 nt, Homo sapiens
  source 1..98: mol_type = genomic RNA
ggattcttataggacagtatgttcttccaggacagaacattctttgctattttgtactggaagaacatgcaaaactaaaaaaaaaaaaagttattgct

SEQ ID NO: 1247 - RNA, 95 nt, Homo sapiens
  source 1..95: mol_type = genomic RNA
gatatacactatattatgtataaatgtatacacacttcctatatgtatccacatatatatagtgtatatattatacatgtataggtgtgtatatg

SEQ ID NO: 1248 - RNA, 96 nt, Homo sapiens
  source 1..96: mol_type = genomic RNA
ggtattgttagattaattttgtgggacattaacaacagcatcagaagcaacatcagctttagttaatgaatcctggaaagttaagtgactttattt

SEQ ID NO: 1249 - RNA, 97 nt, Homo sapiens
  source 1..97: mol_type = genomic RNA
ctagataagttattaggtgggtgcaaaggtaattgcagtttttcccattattttaattgcgaaaacagcaattacctttgcaccaacctgatggagt

SEQ ID NO: 1250 - RNA, 96 nt, Homo sapiens
  source 1..96: mol_type = genomic RNA
cctcagtaagaccaagctcagtgtgccatttccttgtctgtagccatgtctatgggctcttgagttggccatctgagtgagggcctgcttattcta

SEQ ID NO: 1251 - RNA, 95 nt, Homo sapiens
  source 1..95: mol_type = genomic RNA
gtcgaggccgtggcccggaagtggtcggggccgctgcgggcggaagggcgcctgtgcttcgtccgctcggcggtggcccagccaggcccgcggga

SEQ ID NO: 1252 - RNA, 99 nt, Homo sapiens
  source 1..99: mol_type = genomic RNA
tttagcggtttctccctgaagtgatgtgtaactgatcaggatctactcatgtcgtctttggtaaagttatgtcgcttgtcagggtgaggagagtttttg

SEQ ID NO: 1253 - RNA, 96 nt, Homo sapiens
  source 1..96: mol_type = genomic RNA
gggacctgcgtgggtgcgggcgtgtgagtgtgtgtgtgtgagtgtgtgtcgctccgggtccacgctcatgcacacacccacacgcccacactcagg

SEQ ID NO: 1254 - RNA, 94 nt, Homo sapiens
  source 1..94: mol_type = genomic RNA
aattcagccctgccactggcttatgtcatgaccttgggctactcaggctgtctgcacaatgagccagttggacaggagcagtgccactcaactc

SEQ ID NO: 1255 - RNA, 98 nt, Homo sapiens
  source 1..98: mol_type = genomic RNA
tacaatccaacgaggattctaatttctccacgtctttggtaataaggtttggcaaagatgtggaaaaattggaatcctcattcgattggttataacca

SEQ ID NO: 1256 - RNA, 96 nt, Homo sapiens
  source 1..96: mol_type = genomic RNA
tgggggagtgaagagtagataaaatattggtacctgatgaatctgaggccaggtttcaatactttatctgctcttcatttccccatatctacttac

SEQ ID NO: 1257 - RNA, 96 nt, Homo sapiens
  source 1..96: mol_type = genomic RNA
agataaatctatagacaaaatacaatcccggacaacaagaagctcctatagctcctgtagcttcttgtgctctaggattgtattttgtttatatat

SEQ ID NO: 1258 - RNA, 98 nt, Homo sapiens
  source 1..98: mol_type = genomic RNA
catattaggttaatgcaaaagtaatcgcggtttgtgccagatgacgatttgaattaataaattcatttggtataaaccgcgattatttttgcatcaac

SEQ ID NO: 1259 - RNA, 97 nt, Homo sapiens
  source 1..97: mol_type = genomic RNA
ataaaatttccaattggaacctaatgattcatcagactcagatatttaagttaacagtatttgagaatgatgaatcattaggttccggtcagaaatt

SEQ ID NO: 1260 - RNA, 96 nt, Homo sapiens
  source 1..96: mol_type = genomic RNA
gttatgtgaaggtattcttgtgttctctagatcagtgcttttagaaaatttgtgtgatctaaagaacacaaagaatacctacacagaaccacctgc

SEQ ID NO: 1261 - RNA, 98 nt, Homo sapiens
  source 1..98: mol_type = genomic RNA
atctgtgctctttgattacagttgttcaaccagttactaatctaactaattgtaactggttgaacaactgaacccaaagggtgcaaagtagaaacatt

SEQ ID NO: 1262 - RNA, 75 nt, Homo sapiens
  source 1..75: mol_type = genomic RNA
aactcacacattaaccaaagaggaaggtcccattactgcagggatcttagcagtactgggacctacctctttggt

SEQ ID NO: 1263 - RNA, 97 nt, Homo sapiens
  source 1..97: mol_type = genomic RNA
tagggtgaccagccattatggtttgcctgggactgaggaatttgctgggatatgtcagttccaggccaaccaggctggttggtctccctgaagcaac

SEQ ID NO: 1264 - RNA, 94 nt, Homo sapiens
  source 1..94: mol_type = genomic RNA
tggggtgtctgtgctatggcagccctagcacacagatacgcccagagaaagcctgaacgttgggcgtatctgtatgctagggctgctgtaacaa

SEQ ID NO: 1265 - RNA, 97 nt, Homo sapiens
  source 1..97: mol_type = genomic RNA
atggggtaaaaccattatgcattgtatttttaggtcccaatacatgtgggccctaaaaatacaatgcataatggtttttcactctttatcttcttat

SEQ ID NO: 1266 - RNA, 96 nt, Homo sapiens
  source 1..96: mol_type = genomic RNA
ctcctatgcaccctctttccataggtgatgagtcacagggctcagggaatgtgtctgcacctgtgactcatcaccagtggaaagcccatcccatat

SEQ ID NO: 1267 - RNA, 83 nt, Homo sapiens
  source 1..83: mol_type = genomic RNA
agcttaggtaccaatttggccacaatgggttagaacactattccattgtgttcttacccaccatggccaaaattgggcctaag

SEQ ID NO: 1268 - RNA, 99 nt, Homo sapiens
  source 1..99: mol_type = genomic RNA
tccagcctgtgcccagcagcccctgagaaccacgtctgctctgagctgggtactgcctgttcagaacaaatgccggttcccagacgctgccagctggcc

SEQ ID NO: 1269 - RNA, 97 nt, Homo sapiens
  source 1..97: mol_type = genomic RNA
tagccagtcagaaatgagcttattcataaaagtgcagtatggtgaagtcaatctgtaattttatgtataagctagtctctgattgaaacatgcagca

SEQ ID NO: 1270 - RNA, 95 nt, Homo sapiens
  source 1..95: mol_type = genomic RNA
tcttatcaatgaggtagaccatgggttctcattgtaatagtgtagaatgttggttaactgtggactccctggctctgtctcaaatctactgattc

SEQ ID NO: 1271 - RNA, 97 nt, Homo sapiens
  source 1..97: mol_type = genomic RNA
tattatgccatgacattgtgtcaatatgcgatgatgtgttgtgatggcacagcgtcatcacgtggtgacgcaacatcatgacgtaagacgtcacaac

SEQ ID NO: 1272 - RNA, 100 nt, Homo sapiens
  source 1..100: mol_type = genomic RNA
cccccagaatctgtcaggcaccagccaggcattgctcagcccgtttccctctgggggagcaaggagtggtgctgggtttgtctctgctggggtttctcct

SEQ ID NO: 1273 - RNA, 96 nt, Homo sapiens
  source 1..96: mol_type = genomic RNA
acggaagcctgcacgcatttaacaccagcacgctcaatgtagtcttgtaaggaacaggttgaagtgtgccgtggtgtgtctggaggaagcgcctgt

SEQ ID NO: 1274 - RNA, 77 nt, Homo sapiens
  source 1..77: mol_type = genomic RNA
agcacggcctctccgaagcctgcccggctcctcgggaacctgcctcccgcatggcagctgctgcccttcggaggccg

SEQ ID NO: 1275 - RNA, 97 nt, Homo sapiens
  source 1..97: mol_type = genomic RNA
tacttactctacgtgtgtgtcactcgatgaccactgtgaagacagtaaaatgtacagtggttctcttgtggctcaagcgtaatgtagagtactggtc

SEQ ID NO: 1276 - RNA, 97 nt, Homo sapiens
  source 1..97: mol_type = genomic RNA
gcttgatgatgctgctgatgctggcggtgatcccgatggtgtgagctggaaatggggtgctacgtcatcgttgtcatcgtcatcatcatcatccgag

SEQ ID NO: 1277 - RNA, 95 nt, Homo sapiens
  source 1..95: mol_type = genomic RNA
aaagacatgctgtccacagtgtgtttgataagctgacatgggacagggattcttttcactgttgtgtcagtttatcaaacccatacttggatgac

SEQ ID NO: 1278 - RNA, 98 nt, Homo sapiens
  source 1..98: mol_type = genomic RNA
aagtcacgtgctgtggctccagcttcataggaaggctcttgtctgtcaggcagtggagttacttacagacaagagccttgctcaggccagccctgccc

SEQ ID NO: 1279 - RNA, 79 nt, Homo sapiens
  source 1..79: mol_type = genomic RNA
tgcatgagttcgtcttggtctaggattgttggaggagtcagaaaaactaccccagggatcctgaagtcctttgggtgga

SEQ ID NO: 1280 - RNA, 98 nt, Homo sapiens
  source 1..98: mol_type = genomic RNA
ttctcacccccgcctgacacgggcgacagctgcggcccgctgtgttcactcgggccgagtgcgtctcctgtcaggcaagggagagcagagcccccctg

SEQ ID NO: 1281 - RNA, 97 nt, Homo sapiens
  source 1..97: mol_type = genomic RNA
gattgatgctgttggtttggtgcaaaagtaattgcagtgcttcccatttaaaagtaatggcacacactgcaattacttttgctccaacttaatactt

SEQ ID NO: 1282 - RNA, 94 nt, Homo sapiens
  source 1..94: mol_type = genomic RNA
agagcatcgtgcttgaccttccacgctctcgtgtccactagcaggcaggttttctgacacaggctgcggaattcaggacagtgcatcatggaga

SEQ ID NO: 1283 - RNA, 83 nt, Homo sapiens
  source 1..83: mol_type = genomic RNA
gccctagcttggttctaaatcccatggtgccttctccttgggaaaaacagagaaggcactatgagatttagaatcaagttagg

SEQ ID NO: 1284 - RNA, 96 nt, Homo sapiens
  source 1..96: mol_type = genomic RNA
tgtatccttggtttttagtagttttactatgatgaggtgtgccatccaccccatcatagtaaactactgaaaatcaaagatacaagtgcctgacca

SEQ ID NO: 1285 - RNA, 96 nt, Homo sapiens
  source 1..96: mol_type = genomic RNA
ttgcctaaagtcacacaggttatagatctggattggaacccagggagccagactgcctgggttcaaatccagatctataacttgtgtgactttggg

SEQ ID NO: 1286 - RNA, 100 nt, Homo sapiens
  source 1..100: mol_type = genomic RNA
gggccaaggtgggccaggggtggtgttgggacagctccgtttaaaaaggcatctccaagagcttccatcaaaggctgcctcttggtgcagcacaggtaga

SEQ ID NO: 1287 - RNA, 95 nt, Homo sapiens
  source 1..95: mol_type = genomic RNA
tgctcggctgttcctagggtgtttctctcatctctggtctataatgggttaaatagtagagatgagggcaacaccctaggaacagcagaggaacc

SEQ ID NO: 1288 - RNA, 96 nt, Homo sapiens
  source 1..96: mol_type = genomic RNA
tctatttgtcttaggtgagctaaatgtgtgctgggacacatttgagccaaatgtcccagcacacatttagctcacataagaaaaatggactctagt

SEQ ID NO: 1289 - RNA, 67 nt, Homo sapiens
  source 1..67: mol_type = genomic RNA
aaaatggtgagagcgttgaggggagttccagacggagatgcgaggacccctcggggtctgacccaca

SEQ ID NO: 1290 - RNA, 100 nt, Homo sapiens
  source 1..100: mol_type = genomic RNA
tcccatctggaccctgctgggcagggcttctgagctccttagcactagcaggaggggctccaggggccctccctccatggcagccaggacaggactctca

SEQ ID NO: 1291 - RNA, 95 nt, Homo sapiens
  source 1..95: mol_type = genomic RNA
ggtgagtgcgtttccaagtgtgaagggacccttcctgtagtgtcttatatacaatacagtaggaatgttccttctttgccactcatacaccttta

SEQ ID NO: 1292 - RNA, 90 nt, Homo sapiens
  source 1..90: mol_type = genomic RNA
tctaagaaacgcagtggtctctgaagcctgcaggggcaggccagccctgcactgaacgcctgttcttgccaggtggcagaaggttgctgc

SEQ ID NO: 1293 - RNA, 96 nt, Homo sapiens
  source 1..96: mol_type = genomic RNA
ctcgggaggggcgggaggggggtccccggtgctcggatctcgagggtgcttattgttcggtccgagcctgggtctccctcttccccccaacccccc

SEQ ID NO: 1294 - RNA, 97 nt, Homo sapiens
  source 1..97: mol_type = genomic RNA
ttaggtaattcctccactcaaaacccttcagtgacttccatgacatgaaataggaagtcattggagggtttgagcagaggaatgacctgttttaaaa

SEQ ID NO: 1295 - RNA, 97 nt, Homo sapiens
  source 1..97: mol_type = genomic RNA
catcataaggagcctagacttcccatttgaaggtggccatttcctaccaccttcaaatggtaagtccaggctccttctgattcaataaatgaggagc

SEQ ID NO: 1296 - RNA, 98 nt, Homo sapiens
  source 1..98: mol_type = genomic RNA
ctcttgttcacagccaaactctacttgtccttctgagtgtaattacgtacatgcagtagctcaggagacaagcaggtttaccctgtggatgagtctga

SEQ ID NO: 1297 - RNA, 99 nt, Homo sapiens
  source 1..99: mol_type = genomic RNA
cgcccacctcagcctcccaaaatgctgggattacaggcatgagccactgcggtcgaccatgacctggacatgtttgtgcccagtactgtcagtttgcag

SEQ ID NO: 1298 - RNA, 95 nt, Homo sapiens
  source 1..95: mol_type = genomic RNA
atatatatctatatctagctccgtatatatatatatatatatatagatatctccatatatatggagatagatatagaaataaaacaagcaaagaa

SEQ ID NO: 1299 - RNA, 96 nt, Homo sapiens
  source 1..96: mol_type = genomic RNA
tagattgaggaaggggctgagtggtaggcggtgctgctgtgctctgatgaagacccatgtggctagcaacagcgcttaccttttgtctctgggtcc

SEQ ID NO: 1300 - RNA, 96 nt, Homo sapiens
  source 1..96: mol_type = genomic RNA
agagaagctggacaagtactggtctcagcagattgaggagagcaccacagtggtcatcacacagtctgctgaggttggagctgctgagatgacact

SEQ ID NO: 1301 - RNA, 98 nt, Homo sapiens
  source 1..98: mol_type = genomic RNA
gtacacagtagaagcatcccttgcaggggctgttgggttgcatcctaagctgtgctggagcttcccgatgtactctgtagatgtctttgcaccttctg

SEQ ID NO: 1302 - RNA, 97 nt, Homo sapiens
  source 1..97: mol_type = genomic RNA
aatgctgtttcaaggtagtaccagtaccttgtgttcagtggaaccaaggtaaacacaaggtattggtattaccttgagatagcattacacctaagtg

SEQ ID NO: 1303 - RNA, 85 nt, Homo sapiens
  source 1..85: mol_type = genomic RNA
agggtagagggatgagggggaaagttctatagtcctgtaattagatctcaggactatagaactttccccctcatccctctgccct

SEQ ID NO: 1304 - RNA, 94 nt, Homo sapiens
  source 1..94: mol_type = genomic RNA
actgatatatttgtcttatttgagagctgaggagtatttttatgcaatctgaatgatctcagctgtctgaaaatgtcttcaattttaaaggctt

SEQ ID NO: 1305 - RNA, 97 nt, Homo sapiens
  source 1..97: mol_type = genomic RNA
tacttattactggtagtgagtctctaagaaaagaggaggtggttgttttcctcctcttttctttgagactcactaccaataataagaaatactacta

SEQ ID NO: 1306 - RNA, 95 nt, Homo sapiens
  source 1..95: mol_type = genomic RNA
atagctgttgtgtcacttcctcatgctgacatatttactagagggtaaaattaataaccttctagtaagagtggcagtcgaagggaagggctcat

SEQ ID NO: 1307 - RNA, 97 nt, Homo sapiens
  source 1..97: mol_type = genomic RNA
tccctttcccaggggaggggctgggtttacgttgggagaacttttacggtgaaccaggaggttctcccaacgtaagcccagcccctcccctctgcct

SEQ ID NO: 1308 - RNA, 97 nt, Homo sapiens
  source 1..97: mol_type = genomic RNA
aacttaacatcatgctacctctttgtatcatattttgttattctggtcacagaatgacctagtattctgtaccagggaaggtagttcttaactatat

SEQ ID NO: 1309 - RNA, 75 nt, Homo sapiens
  source 1..75: mol_type = genomic RNA
gtggggagcctggttagacctggcccagacctcagctacacaagctgatggactgagtcaggggccacactctcc

SEQ ID NO: 1310 - RNA, 94 nt, Homo sapiens
  source 1..94: mol_type = genomic RNA
cgcctcctaccgcagtgcttgacgggaggcggagcggggaacgaggccgtcggccattttgtgtctgcttcctgtgggacgtggtggtagccgt

SEQ ID NO: 1311 - RNA, 98 nt, Homo sapiens
  source 1..98: mol_type = genomic RNA
aacctctcttagcctctgtttctttattgcggtagatactattaacctaaaatgagaaggctaatagtatctaccacaataaaattgttgtgaggata

SEQ ID NO: 1312 - RNA, 97 nt, Homo sapiens
  source 1..97: mol_type = genomic RNA
aaacccacaccactgcattttggccatcgagggttggggcttggtgtcatgccccaagataaccagcaccccaactttggacagcatggattagtct

SEQ ID NO: 1313 - RNA, 98 nt, Homo sapiens
  source 1..98: mol_type = genomic RNA
cagagaggagctgccacttgggcactgaaacaatgtccattaggctttgttatggaaacttctcctgatcattgttttgtgtccattgagcttccaat

SEQ ID NO: 1314 - RNA, 99 nt, Homo sapiens
  source 1..99: mol_type = genomic RNA
tggcggcctgggcgggagcgcgcgggcggggccggccccgctgcctggaattaaccccgctgtgcttgctcgtcccgcccgcagccctaggcggcgtcg

SEQ ID NO: 1315 - RNA, 99 nt, Homo sapiens
  source 1..99: mol_type = genomic RNA
tggctaaggtgttggctcgggctccccactgcagttaccctcccctcggcgttactgagcactgggggctttcgggctctgcgtctgcacagatacttc

SEQ ID NO: 1316 - RNA, 100 nt, Homo sapiens
  source 1..100: mol_type = genomic RNA
gtgagcgggcgcggcagggatcgcgggcgggtggcggcctagggcgcggagggcggaccgggaatggcgcgccgtgcgccgccggcgtaactgcggcgct

SEQ ID NO: 1317 - RNA, 98 nt, Homo sapiens
  source 1..98: mol_type = genomic RNA
tggccgacggggcgcgcgcggcctggaggggcggggcggacgcagagccgcgtttagtctatcgctgcggttgcgagcgctgtagggagcctgtgctg

SEQ ID NO: 1318 - RNA, 96 nt, Homo sapiens
  source 1..96: mol_type = genomic RNA
gtgaccctgggcaagttcctgaagatcagacacatcagatcccttatctgtaaaatgggcatgatccaggaacctgcctctacggttgccttgggg

SEQ ID NO: 1319 - RNA, 99 nt, Homo sapiens
  source 1..99: mol_type = genomic RNA
tgggtgaaaggaaggaaagacataggatagagtcacctctgtcctctgtcctctacctatagaggtgactgtcctatgtctttccttcctcttacccct

SEQ ID NO: 1320 - RNA, 97 nt, Homo sapiens
  source 1..97: mol_type = genomic RNA
atctgagttgggagggtccctctccaaatgtgtcttggggtgggggatcaagacacatttggagagggaacctcccaactcggcctctgccatcatt

SEQ ID NO: 1321 - RNA, 77 nt, Homo sapiens
  source 1..77: mol_type = genomic RNA
gagttgggaggttccctctccaaatgtgtcttgatcccccaccccaagacacatttggagagggaccctcccaactc

SEQ ID NO: 1322 - RNA, 97 nt, Homo sapiens
  source 1..97: mol_type = genomic RNA
accaagtgatattcattgtctacctgagctagaatacaagtagttggcgtcttcagagacacttgtatgctagctcaggtagatattgaatgaaaaa

SEQ ID NO: 1323 - RNA, 94 nt, Homo sapiens
  source 1..94: mol_type = genomic RNA
tttttttttagtatttttccatcagtgttcataaggaatgttgctctgtagttttcttatagtgtggctttcttagagcaaagatggttcccta

SEQ ID NO: 1324 - RNA, 61 nt, Homo sapiens
  source 1..61: mol_type = genomic RNA
tgggctaagggagatgattgggtagaaagtattattctattcatttgcctcccagcctaca

SEQ ID NO: 1325 - RNA, 94 nt, Homo sapiens
  source 1..94: mol_type = genomic RNA
cagttcctaacaggcctcagaccagtaccggtctgtggcctgggggttgaggacccctgctctaggctggtactgctgatgcttaaaaagagag

SEQ ID NO: 1326 - RNA, 94 nt, Homo sapiens
  source 1..94: mol_type = genomic RNA
gatcaggagtctgccagtggagtcagcacacctgcttttcacctgtgatcccaggagaggaagcagctgcctctgaggcctcaggctcagtggc

SEQ ID NO: 1327 - RNA, 96 nt, Homo sapiens
  source 1..96: mol_type = genomic RNA
aggaagtgttggcctgtggctgcactcacttccttcagccccaggaagccttggtcgggggcaggagggagggtcaggcagggctgggggcctgac

SEQ ID NO: 1328 - RNA, 94 nt, Homo sapiens
  source 1..94: mol_type = genomic RNA
atcacagacacctccaagtgtgcagggcactggtgggggccggggcaggcccagcgaaagtgcaggacctggcacttagtcggaagtgagggtg

SEQ ID NO: 1329 - RNA, 97 nt, Homo sapiens
  source 1..97: mol_type = genomic RNA
ggcctagccaaatactgtatttttgatcgacatttggttgaaaaatatctatgtattagtaaacctgtgttgttcaagagtccactgtgttttgctg

SEQ ID NO: 1330 - RNA, 96 nt, Homo sapiens
  source 1..96: mol_type = genomic RNA
cagtgctggggtctcaggaggcagcgctctcaggacgtcaccaccatggcctgggctctgctcctcctcaccctcctcactcagggcacaggtgat

SEQ ID NO: 1331 - RNA, 97 nt, Homo sapiens
  source 1..97: mol_type = genomic RNA
aatctatcactgctttttaggataagcttgacttttgttcaaataaaaatgcaaaaggaaagtgtatcctaaaaggcaatgacagtttaatgtgttt

SEQ ID NO: 1332 - RNA, 98 nt, Homo sapiens
  source 1..98: mol_type = genomic RNA
acgaatggctatgcactgcacaaccctaggagagggtgccattcacatagactataattgaatggcgccactagggttgtgcagtgcacaacctacac

SEQ ID NO: 1333 - RNA, 96 nt, Homo sapiens
  source 1..96: mol_type = genomic RNA
ttcattccttcagtgttgaaacaatctctactgaaccagcttcaaacaagttcactggagtttgtttcaatattgcaagaatgataagatggaagc

SEQ ID NO: 1334 - RNA, 81 nt, Homo sapiens
  source 1..81: mol_type = genomic RNA
gggtaagtggaaagatggtgggccgcagaacatgtgctgagttcgtgccatatgtctgctgaccatcacctttagaagccc

SEQ ID NO: 1335 - RNA, 97 nt, Homo sapiens
  source 1..97: mol_type = genomic RNA
aactatgcaaggatatttgaggagaggttatccgtgttatgttcgcttcattcatcatgaataatacatggttaacctctttttgaatatcagactc

SEQ ID NO: 1336 - RNA, 78 nt, Homo sapiens
  source 1..78: mol_type = genomic RNA
ctgaaataggttgcctgtgaggtgttcactttctatatgatgaatattatacagtcaacctctttccgatatcgaatc

SEQ ID NO: 1337 - RNA, 98 nt, Homo sapiens
  source 1..98: mol_type = genomic RNA
gtgtagtagagctaggaggagagggtcctggagaagcgtggaccggtccgggtgggttccggcaggttctcaccctctctaggccccattctcctctg

SEQ ID NO: 1338 - RNA, 100 nt, Homo sapiens
  source 1..100: mol_type = genomic RNA
gctcggttgccgtggttgcgggccctgcccgcccgccagctcgctgacagcacgactcagggcggagggaagtaggtccgttggtcggtcgggaacgagg

SEQ ID NO: 1339 - RNA, 97 nt, Homo sapiens
  source 1..97: mol_type = genomic RNA
taccgaccctcgatttggttcaggaccttccctgaaccaaggaagagtcacagtctcttccttggttcagggagggtccccaacaatgtcctcatgg

SEQ ID NO: 1340 - RNA, 97 nt, Homo sapiens
  source 1..97: mol_type = genomic RNA
ctgctccttctcccatacccattgcatatcggagttgtgaattctcaaaacacctcctgtgtgcatggattacaggagggtgagccttgtcatcgtg

SEQ ID NO: 1341 - RNA, 89 nt, Homo sapiens
  source 1..89: mol_type = genomic RNA
ggagaggctgtgctgtggggcaggcgcaggcctgagccctggtttcgggctgcctgggtctctggcctgcgcgtgactttggggtggct

SEQ ID NO: 1342 - RNA, 95 nt, Homo sapiens
  source 1..95: mol_type = genomic RNA
gctgttgaggctgcgcagccaggccctgacggtggggtggctgcgggccttctgaaggtctcccacgttgtggcccagcagcgcagtcacgttgc

SEQ ID NO: 1343 - RNA, 93 nt, Homo sapiens
  source 1..93: mol_type = genomic RNA
ccttccggcgtcccaggcggggcgccgcgggaccgccctcgtgtctgtggcggtgggatcccgcggccgtgttttcctggtggcccggccatg

SEQ ID NO: 1344 - RNA, 115 nt, Homo sapiens
  source 1..115: mol_type = genomic RNA
ggtgccgagggccgtccggcatcctaggcgggtcgctgcggtacctccctcctgtctgtggcggtgggatcccgtggccgtgttttcctggtggcccggccgtgcctgaggtttc

SEQ ID NO: 1345 - RNA, 82 nt, Homo sapiens
  source 1..82: mol_type = genomic RNA
gaacattgaaactggctagggaaaatgattggatagaaactattattctattcatttatccccagcctacaaaatgaaaaaa

SEQ ID NO: 1346 - RNA, 72 nt, Homo sapiens
  source 1..72: mol_type = genomic RNA
tctcctcgaggggtctctgcctctacccaggactctttcatgaccaggaggctgaggcccctcacaggcggc

SEQ ID NO: 1347 - RNA, 66 nt, Homo sapiens
  source 1..66: mol_type = genomic RNA
ggtaagtgcgcctcgggtgagcatgcacttaatgtgggtgtatgtcactcggctcggcccactacc

SEQ ID NO: 1348 - RNA, 98 nt, Homo sapiens
  source 1..98: mol_type = genomic RNA
gtttaggggtggacctgatgtccctgagtgtatgtggtgaacctgaatttgccttgggtttcctcatattcattcaggagtgtcagttgccccttcac

SEQ ID NO: 1349 - RNA, 118 nt, Homo sapiens
  source 1..118: mol_type = genomic RNA
gcaggtgaactggcaggccaggaagaggaggaagccctggaggggctggaggtgatggatgttttcctccggttctcagggctccacctctttcgggccgtagagccagggctggtgc

SEQ ID NO: 1350 - RNA, 73 nt, Homo sapiens
  source 1..73: mol_type = genomic RNA
cccagggtctggtgcggagagggcccacagtggacttggtgacgctgtatgccctcaccgctcagcccctggg

SEQ ID NO: 1351 - RNA, 67 nt, Homo sapiens
  source 1..67: mol_type = genomic RNA
gcatgactcttcaacctcaggacttgcagaattaatggaatgctgtcctaaggttgttgagttgtgc

SEQ ID NO: 1352 - RNA, 88 nt, Homo sapiens
  source 1..88: mol_type = genomic RNA
aactgccctcaaggagcttacaatctagctgggggtaaatgacttgcacatgaacacaactagactgtgagcttctagagggcaggga

SEQ ID NO: 1353 - RNA, 76 nt, Homo sapiens
  source 1..76: mol_type = genomic RNA
actgactttgagtctctcctcagggtgctgcaggcaaagctggggacccagggagagacgtaagtgaggggagatg

SEQ ID NO: 1354 - RNA, 70 nt, Homo sapiens
  source 1..70: mol_type = genomic RNA
ggccgcggcgcgcaagatggcggcgggcccgggcaccgccccttccgccccgccgggcgtcgcacgaggc

SEQ ID NO: 1355 - RNA, 110 nt, Homo sapiens
  source 1..110: mol_type = genomic RNA
ccggatctcacacggtggtgttaatatctcgctggggcctccaaaatgttgtgcccaggggtgttagagaaaacaccacactttgagatgaattaagagtcctttattag

SEQ ID NO: 1356 - RNA, 98 nt, Homo sapiens
  source 1..98: mol_type = genomic RNA
ttgggcaaggtgcggggctagggctaacagcagtcttactgaaggtttcctggaaaccacgcacatgctgttgccactaacctcaaccttactcggtc

SEQ ID NO: 1357 - RNA, 88 nt, Homo sapiens
  source 1..88: mol_type = genomic RNA
gcctggatacatgagatggttgaccagagagcacacgctttatttgtgccgtttgtgacctggtccactaaccctcagtatctaatgc

SEQ ID NO: 1358 - RNA, 91 nt, Homo sapiens
  source 1..91: mol_type = genomic RNA
taataaattaaatgcctaaactggcagagtgcaaacaattttgactcagatctaaatgtttgcactggctgtttaaacatttaatttgtta

SEQ ID NO: 1359 - RNA, 80 nt, Homo sapiens
  source 1..80: mol_type = genomic RNA
ggcgcgtcgcccccctcagtccaccagagcccggatacctcagaaattcggctctgggtctgtggggagcgaaatgcaac

SEQ ID NO: 1360 - RNA, 59 nt, Homo sapiens
  source 1..59: mol_type = genomic RNA
ggaggagcagcagggtgaaactgacacagttctggtgagtttcactttgctgctcctcc

SEQ ID NO: 1361 - RNA, 83 nt, Homo sapiens
  source 1..83: mol_type = genomic RNA
ggcccggctccgggtctcggcccgtacagtccggccggccatgctggcggggctggggccggggccgagcccgcggcggggcc

SEQ ID NO: 1362 - RNA, 85 nt, Homo sapiens
  source 1..85: mol_type = genomic RNA
aatctaggaggcaggtgctcacttgtcctcctccatgcttggaaaatgcagggaggaggccatagtggcaactgttaccatgatt

SEQ ID NO: 1363 - RNA, 114 nt, Homo sapiens
  source 1..114: mol_type = genomic RNA
tttaggcgctgatgaaagtggagttcagtagacagcccttttcaagccctacgagaaactggggtttctggaggagaaggaaggtgatgaaggatctgttctcgtgagcctgaa

SEQ ID NO: 1364 - RNA, 111 nt, Homo sapiens
  source 1..111: mol_type = genomic RNA
gcatcctcaggacctgggcttgggtggtaggaggaattggtgctggtctttcattttggatttgactccagccccacagcctcagccaccccagccaattgtcataggagc

SEQ ID NO: 1365 - RNA, 109 nt, Homo sapiens
  source 1..109: mol_type = genomic RNA
gcttttatattgtaggtttttgctcatgcaccatggttgtctgagcatgcagcatgcttgtctgctcataccccatggtttctgagcaggaaccttcattgtctactgc

SEQ ID NO: 1366 - RNA, 118 nt, Homo sapiens
  source 1..118: mol_type = genomic RNA
gccttggtgctgattcctgggctctgacctgagacctctgggttctgagctgtgatgttgctctcgagctgggatctccggggtcttggttcagggccggggcctctgggttccaagc

SEQ ID NO: 1367 - RNA, 98 nt, Homo sapiens
  source 1..98: mol_type = genomic RNA
aggagccaccttccgagcctccagtaccacgtgtcagggccacatgagctgggcctcgtgggcctgatgtggtgctggggcctcaggggtctgctctt

SEQ ID NO: 1368 - RNA, 94 nt, Homo sapiens
  source 1..94: mol_type = genomic RNA
gttctgttatttgcagtcagtaacaaagattcatccttgtgtccatcatgcaacaaggagaatctttgtcacttagtgtaattaatagctggac

SEQ ID NO: 1369 - RNA, 77 nt, Homo sapiens
  source 1..77: mol_type = genomic RNA
gtgtgcatttgcaggaacttgtgagtctcctattgaaaatgaacaggagactgatgagttcccgggaacacccacaa

SEQ ID NO: 1370 - RNA, 78 nt, Homo sapiens
  source 1..78: mol_type = genomic RNA
ttagccctgcggccccacgcaccagggtaagagagactctcgcttcctgccctggcccgagggaccgactggctgggc

SEQ ID NO: 1371 - RNA, 76 nt, Homo sapiens
  source 1..76: mol_type = genomic RNA
ttagtggtactatacctcagttttatcaggtgttcttaaaatcacctggaaacactgaggttgtgtctcactgaac

SEQ ID NO: 1372 - RNA, 81 nt, Homo sapiens
  source 1..81: mol_type = genomic RNA
tgaagtgctgtggatttctttgtgaatcaccatatctaagctaatgtggtggtggtttacaaagtaattcatagtgcttca

SEQ ID NO: 1373 - RNA, 86 nt, Homo sapiens
  source 1..86: mol_type = genomic RNA
gtagaggagatggcgcaggggacacgggcaaagacttgggggttcctgggaccctcagacgtgtgtcctcttctccctcctcccag

SEQ ID NO: 1374 - RNA, 74 nt, Homo sapiens
  source 1..74: mol_type = genomic RNA
ccgcactctctccattacactaccctgcctcttctccatgagaggcagcggggtgtagtggatagagcacgggt

SEQ ID NO: 1375 - RNA, 79 nt, Homo sapiens
  source 1..79: mol_type = genomic RNA
gtgcagatccttgggagccctgttagactctggattttacacttggagtgaacgggcgccatcccgaggctttgcacag

SEQ ID NO: 1376 - RNA, 77 nt, Homo sapiens
  source 1..77: mol_type = genomic RNA
ggcagtgctctactcaaaaagctgtcagtcacttagattacatgtgactgacacctctttgggtgaaggaaggctca

SEQ ID NO: 1377 - RNA, 79 nt, Homo sapiens
  source 1..79: mol_type = genomic RNA
gtgcttaaagaatggctgtccgtagtatggtctctatatttatgatgattaatatcggacaaccattgttttagtatcc

SEQ ID NO: 1378 - RNA, 77 nt, Homo sapiens
  source 1..77: mol_type = genomic RNA
ggaagtgccctacttggaaaggcatcagttgcttagattacatgtaactattccctttctgagtagagtaagtctta

SEQ ID NO: 1379 - RNA, 79 nt, Homo sapiens
  source 1..79: mol_type = genomic RNA
ccttaatccttgcaacgaacctgagccactgattcagtaaaatactcagtggcacatgtttgttgtgagggtcaaaaga

SEQ ID NO: 1380 - RNA, 79 nt, Homo sapiens
  source 1..79: mol_type = genomic RNA
ccttaatccttgcaacttacctgagtcattgattcagtaaaacattcaatggcacatgtttgttgttagggtcaaaaga

SEQ ID NO: 1381 - RNA, 75 nt, Homo sapiens
  source 1..75: mol_type = genomic RNA
gcagtgccttactcagaaaggtgccagtcacttacactacatgtcactgtgtcctttctgcgtagagtaaggctc

SEQ ID NO: 1382 - RNA, 77 nt, Homo sapiens
  source 1..77: mol_type = genomic RNA
tgcaatgccctactcagaaaggtgccatttatgtagattttatgtcactggctcctttctgggtagagcaaggctca

SEQ ID NO: 1383 - RNA, 75 nt, Homo sapiens
  source 1..75: mol_type = genomic RNA
gtagttgttctacagaagacctggatgtgtaggagctaagacacactccaggggagctgtggaagcagtaacacg

SEQ ID NO: 1384 - RNA, 56 nt, Homo sapiens
  source 1..56: mol_type = genomic RNA
actagtgagggacagaaccaggattcagactcaggtccatgggcctggatcactgg

SEQ ID NO: 1385 - RNA, 81 nt, Homo sapiens
  source 1..81: mol_type = genomic RNA
atggcgttttccctctccctgtcctggactggggtcagactgtgccccgaggagaagcagcagagaataggactacgtcat

SEQ ID NO: 1386 - RNA, 53 nt, Homo sapiens
  source 1..53: mol_type = genomic RNA
aatagagtcttgtgatgtcttgcttaagggccatccaacctagagtctacaac

SEQ ID NO: 1387 - RNA, 77 nt, Homo sapiens
  source 1..77: mol_type = genomic RNA
acttgggtcagttcagaggtcctcggggcgcgcgtcgagtcagccgtgtgcgcagggagacctctcccacccacagt

SEQ ID NO: 1388 - RNA, 83 nt, Homo sapiens
  source 1..83: mol_type = genomic RNA
agaaataaggcttctgtctactactggagacactggtagtataaaacccagagtctccagtaatggacgggagccttatttct

SEQ ID NO: 1389 - RNA, 91 nt, Homo sapiens
  source 1..91: mol_type = genomic RNA
ggcgggggcgcgggcggcagtggcgggagcggcccctcggccatcctccgtctgcccagttaccgcttccgctaccgccgccgctcccgct

SEQ ID NO: 1390 - RNA, 98 nt, Homo sapiens
  source 1..98: mol_type = genomic RNA
tcaaggccactgggacagtagagggaggaatcgcagaaatcactccaggagcaactgagagaccttgcttctactttaccaggtcctgctggcccaga

SEQ ID NO: 1391 - RNA, 86 nt, Homo sapiens
  source 1..86: mol_type = genomic RNA
agcactgcccccggtgagtcagggtggggctggccccctgcttcgtgcccatccgcgctctgactctctgcccacctgcaggagct

SEQ ID NO: 1392 - RNA, 83 nt, Homo sapiens
  source 1..83: mol_type = genomic RNA
gaaggtgtaccatgtgcccttaaaggtgaacccagtgcaccttcatgaaccgtggtacacctttaagaacttggtatgccttc

SEQ ID NO: 1393 - RNA, 82 nt, Homo sapiens
  source 1..82: mol_type = genomic RNA
tgtgggcagggccctggggagctgaggctctgggggtggccggggctgaccctgggcctctgctccccagtgtctgaccgcg

SEQ ID NO: 1394 - RNA, 94 nt, Homo sapiens
  source 1..94: mol_type = genomic RNA
gtgaggtgtgggcccggccccaggagcggggcctgggcagccccgtgtgttgaggaaggaaggcagggcccccgctccccgggcctgaccccac

SEQ ID NO: 1395 - RNA, 117 nt, Homo sapiens
  source 1..117: mol_type = genomic RNA
cacggaagaggacacacccggctgtgtggacatgtgcccagggcccgggacagcgccacggaagaggacgcacccggctgtgtgcacatgtgcccagggcccgggacagcgccacgg

SEQ ID NO: 1396 - RNA, 117 nt, Homo sapiens
  source 1..117: mol_type = genomic RNA
cacggaagaggacgcacccggctgtgtgcacatgtgcccagggcccgggacagcgccacggaagaggacgcacccggctgtgtgcacatgtgcccagggcccgggacagcgccacgg

SEQ ID NO: 1397 - RNA, 117 nt, Homo sapiens
  source 1..117: mol_type = genomic RNA
cacggaagaggacgcacccggctgtgtgcacatgtgcccagggcccgggacagcgccacggaagaggacgcacccggctgtgtgcacatgtgcccagggcccgggacagcgccatgg

SEQ ID NO: 1398 - RNA, 117 nt, Homo sapiens
  source 1..117: mol_type = genomic RNA
catggaagaggacgcacccggctgtgtgcacatgtgcccagggcccgggacagcgccacggaagaggacgcacccggctgtgtgcacatgtgcccagggcccgggacagcgccacgg

SEQ ID NO: 1399 - RNA, 86 nt, Homo sapiens
  source 1..86: mol_type = genomic RNA
attaggagagtatcttctctgttttggccatgtgtgtactcacagcccctcacacatggccgaaacagagaagttactttcctaat

SEQ ID NO: 1400 - RNA, 94 nt, Homo sapiens
  source 1..94: mol_type = genomic RNA
gggacgttctgagctcggggtgggggacgtttgccggtcactgctgctggcgccctgactgttgccgtcctccagccccactcaaaggcatccc

SEQ ID NO: 1401 - RNA, 88 nt, Homo sapiens
  source 1..88: mol_type = genomic RNA
gttccagacacatctcatctgatatacaatattttcttaaattgtataaagagaaattattgtacatcggatgagctgtgtctgggat

SEQ ID NO: 1402 - RNA, 91 nt, Homo sapiens
  source 1..91: mol_type = genomic RNA
gcgttggctggcagaggaagggaagggtccagggtcagctgagcatgccctcaggttgctcactgttcttccctagaatgtcaggtgatgt

SEQ ID NO: 1403 - RNA, 91 nt, Homo sapiens
  source 1..91: mol_type = genomic RNA
ggctggaaaggaagaagcattctttcattggttggtgtgtattgccttgtcaaccaataagaggatgccatttatccttttctgactagct

SEQ ID NO: 1404 - RNA, 69 nt, Homo sapiens
  source 1..69: mol_type = genomic RNA
gctgctggacccacccggccgggaatagtgctcctggttgtttccggctcgcgtgggtgtgtcggcggc

SEQ ID NO: 1405 - RNA, 81 nt, Homo sapiens
  source 1..81: mol_type = genomic RNA
tccactgctgccgccgtcgccgccacccgagccggagcgggctgggccgccaaggcaagatggtggactacagcgtgtggg

SEQ ID NO: 1406 - RNA, 97 nt, Homo sapiens
  source 1..97: mol_type = genomic RNA
gggacttgtcactgcctgtctcctccctctccagcagcgactggattctggagtccatctagagggtcttgggagggatgtgactgttgggaagccc

SEQ ID NO: 1407 - RNA, 89 nt, Homo sapiens
  source 1..89: mol_type = genomic RNA
attattcaaatgctcggagacacagaacattagagaagacaggagttcactgtaggtgatggtgagagtgggcatggagcaggagtgcc

SEQ ID NO: 1408 - RNA, 99 nt, Homo sapiens
  source 1..99: mol_type = genomic RNA
cttgcagaacgaggtgaaggaggtggttctgctcagcagtcaacagtggccacatctccacctgcagcgacttgatggcttccgtgtccttttcgtggg

SEQ ID NO: 1409 - RNA, 99 nt, Homo sapiens; identical to SEQ ID NO: 1408
  source 1..99: mol_type = genomic RNA

SEQ ID NO: 1410 - RNA, 99 nt, Homo sapiens; identical to SEQ ID NO: 1408
  source 1..99: mol_type = genomic RNA

SEQ ID NO: 1411 - RNA, 86 nt, Homo sapiens
  source 1..86: mol_type = genomic RNA
tttggtacttgaagagaggataccctttgtatgttcacttgattaatggcgaatatacagggggagactcttatttgcgtatcaaa

SEQ ID NO: 1412 - RNA, 86 nt, Homo sapiens
  source 1..86: mol_type = genomic RNA
tttggtacttaaagagaggataccctttgtatgttcacttgattaatggcgaatatacagggggagactctcatttgcgtatcaaa

SEQ ID NO: 1413 - RNA, 78 nt, Homo sapiens
  source 1..78: mol_type = genomic RNA
gtagctgaggggatggtagaccggtgacgtgcacttcatttacgatgtaggtcacccgtttgactatccaccagcgcc

SEQ ID NO: 1414 - RNA, 88 nt, Homo sapiens
  source 1..88: mol_type = genomic RNA
acttcctggtatttgaagatgcggttgaccatggtgtgtacgctttatttgtgacgtaggacacatggtctacttcttctcaatatca

SEQ ID NO: 1415 - RNA, 76 nt, Homo sapiens
  source 1..76: mol_type = genomic RNA
tgctacttctcctgagccattctgagcctcaatcacttgccagagagattggttcaggaatttgtcagggatagcc

SEQ ID NO: 1416 - RNA, 83 nt, Homo sapiens
  source 1..83: mol_type = genomic RNA
cctgctgcagaggtgccagctgcagtgggggaggcactgccagggctgcccactctgcttagccagcaggtgccaagaacagg

SEQ ID NO: 1417 - RNA, 85 nt, Homo sapiens
  source 1..85: mol_type = genomic RNA
tcctccccggagccaggatgcagctcaagccacagcagggtgtttagcgctcttcagtggctccagattgtggcgctggtgcagg

SEQ ID NO: 1418 - RNA, 67 nt, Homo sapiens
  source 1..67: mol_type = genomic RNA
acctcgtggcctggtctccattatttgagatgagttacatcttggaggtgaggacgtgcctcgtggt

SEQ ID NO: 1419 - RNA, 63 nt, Homo sapiens
  source 1..63: mol_type = genomic RNA
gaaggcctctgcagggtttgctttgaggtacttccttcctgtcaaccctgttctggagtctgt

SEQ ID NO: 1420 - RNA, 59 nt, Homo sapiens
  source 1..59: mol_type = genomic RNA
cagtgttcatgtagatgtttaagctcttgcagtaggtttttgcaagctagtgaacgctg

SEQ ID NO: 1421 - RNA, 87 nt, Homo sapiens
  source 1..87: mol_type = genomic RNA
gcagggctggcagggaggctgggaggggctggctgggtctggtagtgggcatcagctggccctcatttcttaagacagcacttctgt

SEQ ID NO: 1422 - RNA, 73 nt, Homo sapiens
  source 1..73: mol_type = genomic RNA
caccggcagaatcactgttcagacaggcggagacgggtctttctcgccctctgatgagtcaccactgtggtgg

SEQ ID NO: 1423 - RNA, 85 nt, Homo sapiens
  source 1..85: mol_type = genomic RNA
gtgaggactcgggaggtggagggtggtgccgccggggccgggcgctgtttcagctcgcttctccccccacctcctctctcctcag

SEQ ID NO: 1424 - RNA, 90 nt, Homo sapiens
  source 1..90: mol_type = genomic RNA
gtgggtacggcccagtgggggggagagggacacgccctgggctctgcccagggtgcagccggactgactgagcccctgtgccgcccccag

SEQ ID NO: 1425 - RNA, 75 nt, Homo sapiens
  source 1..75: mol_type = genomic RNA
gtgagggcatgcaggcctggatggggcagctgggatggtccaaaagggtggcctcaccagccctgtgttccctag

SEQ ID NO: 1426 - RNA, 88 nt, Homo sapiens
  source 1..88: mol_type = genomic RNA
gtggggccaggcggtggtgggcactgctggggtgggcacagcagccatgcagagcgggcatttgaccccgtgccacccttttccccag

SEQ ID NO: 1427 - RNA, 73 nt, Homo sapiens
  source 1..73: mol_type = genomic RNA
gtgggcgggggcaggtgtgtggtgggtggtggcctgcggtgagcagggccctcacacctgcctcgccccccag

SEQ ID NO: 1428 - RNA, 69 nt, Homo sapiens
  source 1..69: mol_type = genomic RNA
gtgggtagggtttgggggagagcgtgggctggggttcagggacaccctctcaccactgccctcccacag

SEQ ID NO: 1429 - RNA, 92 nt, Homo sapiens
  source 1..92: mol_type = genomic RNA
gtcagtgtctgggcggacagctgcaggaaagggaagaccaaggcttgctgtctgtccagtctgccaccctaccctgtctgttcttgccacag

SEQ ID NO: 1430 - RNA, 82 nt, Homo sapiens
  source 1..82: mol_type = genomic RNA
gtgagtgggaggccagggcacggcagggggagctgcagggctatgggaggggccccagcgtctgagccctgtcctcccgcag

SEQ ID NO: 1431 - RNA, 82 nt, Homo sapiens; identical to SEQ ID NO: 1430
  source 1..82: mol_type = genomic RNA

SEQ ID NO: 1432 - RNA, 84 nt, Homo sapiens
  source 1..84: mol_type = genomic RNA
gtgagtgtggggtggctggggggggggggggggggccggggacggcttgggcctgcctagtcggcctgaccacccaccccacag

SEQ ID NO: 1433 - RNA, 102 nt, Homo sapiens
  source 1..102: mol_type = genomic RNA
gtgagtgacaggggaaatggggatggactggaagtgggcagcatggagctgaccttcatcatggcttggccaacataatgcctcttccccttgtctctccag

SEQ ID NO: 1434 - RNA, 102 nt, Homo sapiens
  source 1..102: mol_type = genomic RNA
gtgggagggcccaggcgcgggcaggggtgggggtggcagagcgctgtcccgggggcggggccgaagcgcggcgaccgtaactccttctgctccgtcccccag

SEQ ID NO: 1435 - RNA, 83 nt, Homo sapiens
  source 1..83: mol_type = genomic RNA
gtgagtgggagccccagtgtgtggttggggccatggcgggtgggcagcccagcctctgagccttcctcgtctgtctgccccag

SEQ ID NO: 1436 - RNA, 93 nt, Homo sapiens
  source 1..93: mol_type = genomic RNA
ctaaaactggatcaattataggagtgaaataaaggtccatctcctgcctatttattactttgctttggtaataaatctatttttaaaagaacc

SEQ ID NO: 1437 - RNA, 85 nt, Homo sapiens
  source 1..85: mol_type = genomic RNA
atcttattccgagcattccagtaacttttttgtgtatgtacttagctgtactataagtagttggtttgtatgagatggttaaaaa

SEQ ID NO: 1438 - RNA, 85 nt, Homo sapiens; identical to SEQ ID NO: 1437
  source 1..85: mol_type = genomic RNA

SEQ ID NO: 1439 - RNA, 85 nt, Homo sapiens; identical to SEQ ID NO: 1437
  source 1..85: mol_type = genomic RNA

SEQ ID NO: 1440 - RNA, 70 nt, Homo sapiens
  source 1..70: mol_type = genomic RNA
atttatgtataggcctttagatcatctgatgttgaatactctttaagtgatctaaaggcctacatataaa

SEQ ID NO: 1441 - RNA, 69 nt, Homo sapiens
  source 1..69: mol_type = genomic RNA
tttatatgtaggcctttagatcacttaaagagtattcaacatcagatgatctaaaggcctatacataaa

SEQ ID NO: 1442 - RNA, 73 nt, Homo sapiens
  source 1..73: mol_type = genomic RNA
tgtatccttgaatggatttttggagcaggagtggacacctgacccaaaggaaatcaatccataggctagcaat

SEQ ID NO: 1443 - RNA, 136 nt, Homo sapiens
  source 1..136: mol_type = genomic RNA
ccgcttgcctcgcccagcgcagccccggccgctgggcgcacccgtcccgttcgtccccggacgttgctctctaccccgggaacgtcgagactggagcgcccgaactgagccaccttcgcggaccccgagagcggcg

SEQ ID NO: 1444 - RNA, 106 nt, Homo sapiens
  source 1..106: mol_type = genomic RNA
tttaccttcttgtataagcactgtgctaaaattgcagacactaggaccatgtcttggtttttgcaataatgctagcagagtacacacaagaagaaaagtaacagca

SEQ ID NO: 1445 - RNA, 66 nt, Homo sapiens
  source 1..66: mol_type = genomic RNA
gggaggagggaggagatgggccaagttccctctggctggaacgcccttcccccccttcttcacctg

SEQ ID NO: 1446 - RNA, 113 nt, Homo sapiens
  source 1..113: mol_type = genomic RNA
ctgtcccgctggcctggcaggtgacggtgctggatgtggcctttttgccttttctaaaggccacattttccagcccattcaaccttccagagccctctgaagtggccacaggc

SEQ ID NO: 1447 - RNA, 70 nt, Homo sapiens
  source 1..70: mol_type = genomic RNA
gtggactctagctgccaaaggcgcttctccttctgaacagagcgctttgctcagccagtgtagacatggc

SEQ ID NO: 1448 - RNA, 65 nt, Homo sapiens
  source 1..65: mol_type = genomic RNA
agaaagaaggaaattgaattcatttagaaaagagaattccaaatgagcttaatttccttttttct

SEQ ID NO: 1449 - RNA, 105 nt, Homo sapiens
  source 1..105: mol_type = genomic RNA
agcagcaagagatagaatccaaaagagaagaagatcagcctgcagatgtggactgctaaatgcaggctgatcttctcccctttgggattctcttatgagaagcca

SEQ ID NO: 1450 - RNA, 97 nt, Homo sapiens
  source 1..97: mol_type = genomic RNA
ggtgggaggattgcttgagcctggaagctggagcctgcagtgaactatcattgtgccactgtactccagcctaggcaacaaaatgaaatcctgtcta

SEQ ID NO: 1451 - RNA, 63 nt, Homo sapiens
  source 1..63: mol_type = genomic RNA
ctgagcctggaagctggagcctgcagtgagctatgatcatgtccctgtactctagcctgggca

SEQ ID NO: 1452 - RNA, 113 nt, Homo sapiens
  source 1..113: mol_type = genomic RNA
attggaaatcctttgagttgcttctcaaggatgagcaaagaaagtagattttttagattctaaagaaactatcttctttgctcatccttgagaagcaactccttatccattaa

SEQ ID NO: 1453 - RNA, 63 nt, Homo sapiens
  source 1..63: mol_type = genomic RNA
tacggatgagcaaagaaagtggtttcttaaaatggaatctactctttgtgaagatgctgtgaa

SEQ ID NO: 1454 - RNA, 67 nt, Homo sapiens
  source 1..67: mol_type = genomic RNA
tcttacggatgagcaaagaaagtggtttgcgcctcaagaaaccactttctttgctcatccataagga

SEQ ID NO: 1455 - RNA, 119 nt, Homo sapiens
  source 1..119: mol_type = genomic RNA
agtcagcctgttgaagctttgaagctttgatgccaggcattgacttctcactagctgtgaaagtcctagctaaagagaagtcaatgcatgacatcttgtttcaatagatggctgtttca

SEQ ID NO: 1456 - RNA, 117 nt, Homo sapiens
  source 1..117: mol_type = genomic RNA
gccctgggcttgtgcttggggagtgaatgatgggttctgacccccatgcacccctgtgggcccctggcatcactggccccatccttcacccctgccaaccacgcttgccctgtgcct

SEQ ID NO: 1457 - RNA, 73 nt, Homo sapiens
  source 1..73: mol_type = genomic RNA
ctgtggcttccacgacctaatcctaactcctgcgagtccctggagttaggattaggtcgtggaagccacagga

SEQ ID NO: 1458 - RNA, 73 nt, Homo sapiens
  source 1..73: mol_type = genomic RNA
acctttccagctcatcccacctctgccaccaaaacactcatcgcggggtcagagggagtgccaaaaaaggtaa

SEQ ID NO: 1459 - RNA, 89 nt, Homo sapiens
  source 1..89: mol_type = genomic RNA
tctccgtttatcccaccactgccaccattattgctactgttcagcaggtgctgctggtggtgatggtgatagtctggtgggggcggtgg

SEQ ID NO: 1460 - RNA, 82 nt, Homo sapiens
  source 1..82: mol_type = genomic RNA
tgctatggataaggctttggcttatggggatattgtggttgatctgttctatccagatgactgaaactttctccatagcagc

SEQ ID NO: 1461 - RNA, 93 nt, Homo sapiens
  source 1..93: mol_type = genomic RNA
atctacaatggtgatgggtgaatttgtagaaggatgaaagtcaaagaatccttctgggaactaatttttggccttcaacaagaattgtgatat

SEQ ID NO: 1462 - RNA, 86 nt, Homo sapiens
  source 1..86: mol_type = genomic RNA
ctaccccaaaatatggtaccctggcatactgagtattttaatactggcatactcagtatgccatgttgccatattttggggtagca

SEQ ID NO: 1463 - RNA, 69 nt, Homo sapiens
  source 1..69: mol_type = genomic RNA
aggtcctcaataagtatttgttgaaagaataaataaaccaacaagtcttatttgagcacctgttatgtg

SEQ ID NO: 1464 - RNA, 86 nt, Homo sapiens
  source 1..86: mol_type = genomic RNA
atggtttgggactcaggatgtggtcaagtgttgttaaggcatgttcaggaacaatacttgaccacattttgaattccaaaccatat

SEQ ID NO: 1465 - RNA, 84 nt, Homo sapiens
  source 1..84: mol_type = genomic RNA
acaggtagtgtccctcagggctgtagaacagggctgggattactaaagccctgttctatgccctgagggacactgagcatgtca

SEQ ID NO: 1466 - RNA, 78 nt, Homo sapiens
  source 1..78: mol_type = genomic RNA
ctcccaaatctcctgttgaagtgtaatccccacctccagcattggggattacatttcaacatgagatttggatgagga

SEQ ID NO: 1467 - RNA, 52 nt, Homo sapiens
  source 1..52: mol_type = genomic RNA
tagccgggcgtggtggtgggggcctgtggtcccagctactttggaggctgag

SEQ ID NO: 1468 - RNA, 50 nt, Homo sapiens
  source 1..50: mol_type = genomic RNA
acccgggcgtggtggtgggggtgggtgcctgtaattccagctagttggga

SEQ ID NO: 1469 - RNA, 105 nt, Homo sapiens
  source 1..105: mol_type = genomic RNA
tggattgcctagaccagggaagccagttggcatggctcagtccaagtctgaccacctgaggaatgcctggactgagccgtgctactggcttccctggtctccagc

SEQ ID NO: 1470 - RNA, 75 nt, Homo sapiens
  source 1..75: mol_type = genomic RNA
tgaggtttctggactgagccatgctactggcttctctggttctccagcttacagatggcttatcatgggacctct

SEQ ID NO: 1471 - RNA, 83 nt, Homo sapiens
  source 1..83: mol_type = genomic RNA
cacagagttatactggagatatggaagagctgtgttgggtataagtaacaggcttttctttatcttctatgtggctctttgca

SEQ ID NO: 1472 - RNA, 83 nt, Homo sapiens; identical to SEQ ID NO: 1471
  source 1..83: mol_type = genomic RNA

SEQ ID NO: 1473 - RNA, 86 nt, Homo sapiens
  source 1..86: mol_type = genomic RNA
cacccagatcagtgcttggcacctagcaagcactcagtaaatatttgttgagtgcctgctatgtgccaggcattgtgctgagggct

SEQ ID NO: 1474 - RNA, 129 nt, Homo sapiens
  source 1..129: mol_type = genomic RNA
ccagatcagatctgggtgcgatgatgatggcagcaaattctgaaaacgtgctcagtgtctttataacaggaaagccgtaaacttagaaatgtaggctgcagctcgtgtgctctgtggtctgggctggta

SEQ ID NO: 1475 - RNA, 103 nt, Homo sapiens
  source 1..103: mol_type = genomic RNA
tgaggcaggagaattgcttgaacccgggtggtggaggttgcagtgagccaagattgcgccactgcactccagcctgggcgacaaagcaagactctttcttgga

SEQ ID NO: 1476 - RNA, 77 nt, Homo sapiens
  source 1..77: mol_type = genomic RNA
tgcagcctgggcgacaaaacgagaccctgtctttttttttttctgagacagagtctcgttctgttgcccaagctgga

SEQ ID NO: 1477 - RNA, 86 nt, Homo sapiens
  source 1..86: mol_type = genomic RNA
gaatcgcttgaacccatgaggttgaggctgcagtgagccaagatcgtgccactgcacttcagcctgggtgacaagagcgaaacttc

SEQ ID NO: 1478 - RNA, 102 nt, Homo sapiens
  source 1..102: mol_type = genomic RNA
tgaggcaggagaattgcttgaacccaggaagtggaggctgcagtgagccgagatcgagccactgtactccagcctgggtgacacagcgagactccagtctca

SEQ ID NO: 1479 - RNA, 99 nt, Homo sapiens
  source 1..99: mol_type = genomic RNA
aggtgggaggattgcttgagcctgggagatggaggttgcagtgagctgagatcacgcaactgcacccccagcctgggccatagagtcagtccttgtctc

SEQ ID NO: 1480 - RNA, 100 nt, Homo sapiens
  source 1..100: mol_type = genomic RNA
gaggtgggaggattgcttgagtcagggtggttgaggctgcagtaagttgtgatcataccactgcactccagcctgagtgacagagcaagaccttgtctca

SEQ ID NO: 1481 - RNA, 80 nt, Homo sapiens
  source 1..80: mol_type = genomic RNA
cctctgtgagaaagggtgtgggggagaggctgtcttgtgtctgtaagtatgccaaacttattttccccaaggcagaggga

SEQ ID NO: 1482 - RNA, 83 nt, Homo sapiens
  source 1..83: mol_type = genomic RNA
ccccagctaggtaaagagccctgtggagacacctggattcagagaacatgtctccactgagcacttgggccttgatggcggct

SEQ ID NO: 1483 - RNA, 78 nt, Homo sapiens
  source 1..78: mol_type = genomic RNA
acctcccaaatatatatatatatgtacgtatgtgtatataaatgtatacgtagatatatatgtatttttggtgggttt

SEQ ID NO: 1484 - RNA, 81 nt, Homo sapiens
  source 1..81: mol_type = genomic RNA
atttgctcatagatgatatgcatagtactcccagaactcattaagttggtagtactgtgcatatcatctatgagcgaatag

SEQ ID NO: 1485 - RNA, 62 nt, Homo sapiens
  source 1..62: mol_type = genomic RNA
atattcacaaaaattcatattgcttctttctaatgccaagaaagaagagtataagaacttcc

SEQ ID NO: 1486 - RNA, 94 nt, Homo sapiens
  source 1..94: mol_type = genomic RNA
tctgtcccaccgctgccaccctcccctctgcctcagtgtgccaggcatcagcactcactcacagaggcaggctggatggcgggtgggacaacag

SEQ ID NO: 1487 - RNA, 54 nt, Homo sapiens
  source 1..54: mol_type = genomic RNA
agggggcaccgggaggaggtgagtgtctcttgtcgcctcctcctctcccccctt

SEQ ID NO: 1488 - RNA, 101 nt, Homo sapiens
  source 1..101: mol_type = genomic RNA
ccttcttctcgtttgcctttttctgcttctgctgcatgatctccgagtccctgggggtagagatgatggggcactgggaggtaccagagggcaaaaaggac

SEQ ID NO: 1489 - RNA, 87 nt, Homo sapiens
  source 1..87: mol_type = genomic RNA
ctcaagctatgagtctacaaaggaaagcgctttctgttgtcagaaagaagagaaagcgcttcccttttgagggttacggtttgagaa

SEQ ID NO: 1490 - RNA, 87 nt, Homo sapiens
  source 1..87: mol_type = genomic RNA
ctcaagctgtgagtctacaaaggaaagcgctttctgttgtctgaaagaaaagaaatcgcttccctttggagtgttacggtttgagaa

SEQ ID NO: 1491 - RNA, 120 nt, Homo sapiens
  source 1..120: mol_type = genomic RNA
attttgatatataagccagtttaatgttttctatacagaccctggcttttcttaaattttatatattggaaagcccatgtttgtattggaaactgctggtttctttcatactgaaaatct

SEQ ID NO: 1492 - RNA, 84 nt, Homo sapiens
  source 1..84: mol_type = genomic RNA
tgtagagataggatctcactttgttgcccaggctggtctcaaactcctggtctgggcaacaaagtgagaccttatctctacaag

SEQ ID NO: 1493 - RNA, 88 nt, Homo sapiens
  source 1..88: mol_type = genomic RNA
tttgggaggccgaggctggtgcatcacttgagcccagcaatttgagaccaatctgggcaacaaagtgagacctccgtctctacaaaga

SEQ ID NO: 1494 - RNA, 78 nt, Homo sapiens
  source 1..78: mol_type = genomic RNA
tgtcctctggggactcagcttgctctggctgctggattgaattagctgcaggaccaagatgagcccttggtggagaca

SEQ ID NO: 1495 - RNA, 90 nt, Homo sapiens
  source 1..90: mol_type = genomic RNA
gttgtgctgtccaggtgctggatcagtggttcgagtctgagcctttaaaagccactctagccacagatgcagtgattggagccatgacaa

SEQ ID NO: 1496 - RNA, 75 nt, Homo sapiens
  source 1..75: mol_type = genomic RNA
gagggtgttgatcagcagatcaggactgtaactcaccatagtggtggactgccctgatctggagaccactgcctt

SEQ ID NO: 1497 - RNA, 144 nt, Homo sapiens
  source 1..144: mol_type = genomic RNA
ttctcaatttttagtaggaattaaaaacaaaactggtaaatgcagactcttggtttccacccccagagaatccctaaaccgggggtggagtccaggaatctgcattttagaaagtacccagggtgattctgataattgggaaca

SEQ ID NO: 1498 - RNA, 111 nt, Homo sapiens
  source 1..111: mol_type = genomic RNA
ccacggtcctagttaaaaaggcacattcctagaccctgcctcagaactactgaacagagtcactgggtgtggagtccaggaatctgcatttttacccctatcgcccccgcc

SEQ ID NO: 1499 - RNA, 78 nt, Homo sapiens
  source 1..78: mol_type = genomic RNA
gagcgtcacgttgacactcaaaaagtttcagattttggaacatttcggattttggatttttggatcagggatgctcaa

SEQ ID NO: 1500 - RNA, 87 nt, Homo sapiens
  source 1..87: mol_type = genomic RNA
ggtagaattccagtggccctgactgaagaccagcagttgtactgtggctgttggtttcaagcagaggcctaaaggactgtcttcctg

SEQ ID NO: 1501 - RNA, 66 nt, Homo sapiens
  source 1..66: mol_type = genomic RNA
cctgggaacgggttccggcagacgctgaggttgcgttgacgctcgcgccccggctcccgttccagg

SEQ ID NO: 1502 - RNA, 71 nt, Homo sapiens
  source 1..71: mol_type = genomic RNA
aggttgttctgggtggtctggagatttgtgcagcttgtacctgcacaaatctccggaccacttagtcttta

SEQ ID NO: 1503 - RNA, 142 nt, Homo sapiens
  source 1..142: mol_type = genomic RNA
cacctaatgtgtgccaagatctgttcatttatgatctcaccgagtcctgtgaggttggcattgttgtctggcattgtctgatatacaacagtgccaacctcacaggactcagtgaggtgaaactgaggattaggaaggtgta

SEQ ID NO: 1504 - RNA, 79 nt, Homo sapiens
  source 1..79: mol_type = genomic RNA
aggacattttgcccagatccgtggcctattcagaaatgtggcctgtgattaggccgcagatctgggtgaaatgtcctcc

SEQ ID NO: 1505 - RNA, 60 nt, Homo sapiens
  source 1..60: mol_type = genomic RNA
cacccagatctgcggcctaatcacaggccacatttctgaataggccacggatctgggcaa

SEQ ID NO: 1506 - RNA, 92 nt, Homo sapiens
  source 1..92: mol_type = genomic RNA
acctacctaactgggttagggccctggctccatctcctttaggaaaaccttctgtggggagtggggcttcgaccctaacccaggtgggctgt

SEQ ID NO: 1507 - RNA, 77 nt, Homo sapiens
  source 1..77: mol_type = genomic RNA
tgtttatctctagggttgatctattagaattacttatctgagccaaagtaattcaagtaattcaggtgtagtgaaac

SEQ ID NO: 1508 - RNA, 112 nt, Homo sapiens
  source 1..112: mol_type = genomic RNA
agacgaggagttaagagttcattcggctgtccagatgtatccaagtaccctgtgttatttggcaataaatacatctgggcaactgactgaacttttcacttttcatgactca

SEQ ID NO: 1509 - RNA, 83 nt, Homo sapiens
  source 1..83: mol_type = genomic RNA
cctcatggcagtgttctggaatcctacgtgagggacaatcattcagacccacgtagcagtgttctggaattctgtgtgaggga

SEQ ID NO: 1510 - RNA, 82 nt, Homo sapiens
  source 1..82: mol_type = genomic RNA
ggattgtggggggtcgctctaggcaccgcagcactgtgctggggatgttgcagctgcctgggagtgacttcacacagtcctc

SEQ ID NO: 1511 - RNA, 143 nt, Homo sapiens
  source 1..143: mol_type = genomic RNA
cagaaagcccagttaaatttgaatttcaagtaaacaatgaataattgtgtatgtaagaatatcccatacaatatttgggacatacttatgctaaaaattattccttgcttatctgaaattcaaatgtaactaggattcctgta

SEQ ID NO: 1512 - RNA, 138 nt, Homo sapiens
  source 1..138: mol_type = genomic RNA
ggatgcccagctagtttgaattttagataaacaacgaataatttcgtagcataaatatgtcccaagcttagtttgggacatacttatgctaaaaaacattattggttgtttatctgagattcagaattaagcatttta

SEQ ID NO: 1513 - RNA, 138 nt, Homo sapiens; identical to SEQ ID NO: 1512
  source 1..138: mol_type = genomic RNA

SEQ ID NO: 1514 - RNA, 138 nt, Homo sapiens; identical to SEQ ID NO: 1512
  source 1..138: mol_type = genomic RNA

SEQ ID NO: 1515 - RNA, 138 nt, Homo sapiens
  source 1..138: mol_type = genomic RNA
ggatgcccagctagtttgaattttagataaacaacgaataatttcgtagcataaatatttcccaagcttagtttgggacatacttatgctaaaaaacattattggttgtttatctgagattcaaaattaagcatttta

SEQ ID NO: 1516 - RNA, 150 nt, Homo sapiens
  source 1..150: mol_type = genomic RNA
aatgcagaagcacagctaaaatttgaatttcagataaacaaatttttcttagaataagtatgtctccatgcaacatttgggacatacttatgctaaaatattatttgtgtttcatctgaaattcaaattcaactggacatcctgtatttt

SEQ ID NO: 1517 - RNA, 150 nt, Homo sapiens
  source 1..150: mol_type = genomic RNA
tgcccggcctcccattaaattggtttttcagacaaatcacaaatttgtttaggtataagtatatcccatgtaatctttgggacatacttatgctaaaataattgttccttgttgattggaaattttaattttaattaggtgtcctgtatt

SEQ ID NO: 1518 - RNA, 90 nt, Homo sapiens
  source 1..90: mol_type = genomic RNA
aacaaataatttggtaatatatgtatggcccacacaatatttaggacaacaatatttgggacatacttatgctaaaaaagtatttgttga

SEQ ID NO: 1519 - RNA, 72 nt, Homo sapiens
  source 1..72: mol_type = genomic RNA
acaacatgtttttaggacatgtatgtctggtgcaataattgggacatacttatgctaaaaaaattagtgttc

SEQ ID NO: 1520 - RNA, 128 nt, Homo sapiens
  source 1..128: mol_type = genomic RNA
cccatttaaacttgaatttcatataaacaccgtaattttcagcattagtgtatcacatgcagtatttgggacatacttatgctaaaaaattaggtggtgttgatctgaaattccagtgtagatgggca

SEQ ID NO: 1521 - RNA, 138 nt, Homo sapiens; identical to SEQ ID NO: 1512
  source 1..138: mol_type = genomic RNA

SEQ ID NO: 1522 - RNA, 86 nt, Homo sapiens
  source 1..86: mol_type = genomic RNA
ggctgggcaacatagcgagacctcaactctacaatttttttttttttaaattttagagacggggtcttgctctgttgccaggcttt

SEQ ID NO: 1523 - RNA, 91 nt, Homo sapiens
  source 1..91: mol_type = genomic RNA
aaacacttgagcccagcggtttgaggctacagtgagatgtgatcctgccacatctcactgtagcctcgaacccctgggctcaagtgattca

SEQ ID NO: 1524 - RNA, 86 nt, Homo sapiens
  source 1..86: mol_type = genomic RNA
aagatcctgctgtttctaccattagttttgaatgtttattgtaaagatacttttcaactctaatgggagagacagcaggattctcc

SEQ ID NO: 1525 - RNA, 85 nt, Homo sapiens
  source 1..85: mol_type = genomic RNA
gtgagcagtctccaccacctcccctgcaaacgtccagtggtgcagaggtaatggacgttggctctggtggtgatggacagtccga

SEQ ID NO: 1526 - RNA, 149 nt, Homo sapiens
  source 1..149: mol_type = genomic RNA
catcaagacccagctgagtcactgtcactgcctaccaatctcgaccggacctcgaccggctcgtctgtgttgccaatcgactcggcgtggcgtcggtcgtggtagataggcggtcatgcatacgaattttcagctcttgttctggtgac

SEQ ID NO: 1527 - RNA, 79 nt, Homo sapiens
  source 1..79: mol_type = genomic RNA
acattatgaagcaagtattattatccctgttttacaaataaggaaataaactcagggaggtgaatgtgatcaaagatag

SEQ ID NO: 1528 - RNA, 71 nt, Homo sapiens
  source 1..71: mol_type = genomic RNA
agtatcatgaattagaaacctacttattacatagtttacataagaagcgtgatgatgctgctgatgctgta

SEQ ID NO: 1529 - RNA, 73 nt, Homo sapiens
  source 1..73: mol_type = genomic RNA
actgaggtcctcaaaactgaggggcattttctgtggtttgaaaggaaagtgcacccagttttggggatgtcaa

SEQ ID NO: 1530 - RNA, 96 nt, Homo sapiens
  source 1..96: mol_type = genomic RNA
cctgaagaggtgcatgaagcctggtcctgccctcactgggaacccccttccctctgggtaccagacagaattctatgcactttcctggaggctcca

SEQ ID NO: 1531 - RNA, 84 nt, Homo sapiens
  source 1..84: mol_type = genomic RNA
gctggcgtcggtgctggggagcggcccccgggtgggcctctgctctggcccctcctggggcccgcactctcgctctgggcccgc

SEQ ID NO: 1532 - RNA, 86 nt, Homo sapiens
  source 1..86: mol_type = genomic RNA
ggtgggtggtttctccgtttgcctgtttcgctgatgtgcattcaactcattctcagcaaaataagcaaatggaaaattcgtccatc

SEQ ID NO: 1533 - RNA, 47 nt, Homo sapiens
  source 1..47: mol_type = genomic RNA
ctcggcgcggggcgcgggctccgggttggggcgagccaacgccgggg

SEQ ID NO: 1534 - RNA, 61 nt, Homo sapiens
  source 1..61: mol_type = genomic RNA
gccctccgcccgtgcaccccggggcaggagaccccgcgggacgcgccgaggtaggggggac

SEQ ID NO: 1535 - RNA, 57 nt, Homo sapiens
  source 1..57: mol_type = genomic RNA
gcccgcgtgtggagccaggtgtagaggcggagcacagctggctctaatttgaggggc

SEQ ID NO: 1536 - RNA, 61 nt, Homo sapiens
  source 1..61: mol_type = genomic RNA
acagctgtaattagtcagttttctgtcctgtccacacagaaaaccgtctagttacagttgt

SEQ ID NO: 1537 - RNA, 61 nt, Homo sapiens
  source 1..61: mol_type = genomic RNA
gggaacagcagcaacatgggcctcgcttcctgccggcgcggcccgggctgctgctgttcct

SEQ ID NO: 1538 - RNA, 50 nt, Homo sapiens
  source 1..50: mol_type = genomic RNA
ggctctgcggcctgcaggtagcgcgaaagtcctgcgcgtcccagatgccc

SEQ ID NO: 1539 - RNA, 53 nt, Homo sapiens
  source 1..53: mol_type = genomic RNA
tttgggctgggctgggttgggcagttcttctgctggactcacctgtgaccagc

SEQ ID NO: 1540 - RNA, 53 nt, Homo sapiens
  source 1..53: mol_type = genomic RNA
agagactggggtgctgggctcccctagactaggactccagtgccctcctctcc

SEQ ID NO: 1541 - RNA, 66 nt, Homo sapiens
  source 1..66: mol_type = genomic RNA
tcagcagcacagccttcagcctaaagcaatgagaagcctctgaaaggctgaggcagtagattgaat

SEQ ID NO: 1542 - RNA, 80 nt, Homo sapiens
  source 1..80: mol_type = genomic RNA
cgggaatgccgcggcggggacggcgattggtccgtatgtgtggtgccaccggccgccggctccgccccggcccccgcccc

SEQ ID NO: 1543 - RNA, 80 nt, Homo sapiens
  source 1..80: mol_type = genomic RNA
catccaggacaatggtgagtgccggtgcctgccctggggccgtccctgcgcaggggccgggtgctcaccgcatctgcccc

SEQ ID NO: 1544 - RNA, 80 nt, Homo sapiens
  source 1..80: mol_type = genomic RNA
tgtcccttcagccagtcctgtgcctgccgcctttgtgctgtccttggagggaggcagaagcaggatgacaatgagggcaa

SEQ ID NO: 1545 - RNA, 80 nt, Homo sapiens
  source 1..80: mol_type = genomic RNA
tcggcatctgctgagtaccgccatgtctgttgggcatccacagtctcccaccaggcattgtggtctccgctgacgctttg

SEQ ID NO: 1546 - RNA, 80 nt, Homo sapiens
  source 1..80: mol_type = genomic RNA
ctctaggatgtgctcattgcatgggctgtgtatagtattattcaatacccagagcatgcagtgtgaacataatagagatt

SEQ ID NO: 1547 - RNA, 80 nt, Homo sapiens
  source 1..80: mol_type = genomic RNA
acctctacctcccggcagaggaggctgcagaggctggctttccaaaactctgccccctccgctgctgccaagtggctggt

SEQ ID NO: 1548 - RNA, 80 nt, Homo sapiens
  source 1..80: mol_type = genomic RNA
cgtgtgagcccgccctgtgcccggcccacttctgcttcctcttagcgcaggaggggtcccgcactgggaggggccctcac

SEQ ID NO: 1549 - RNA, 80 nt, Homo sapiens
  source 1..80: mol_type = genomic RNA
tgagaggccgcaccttgccttgctgcccgggccgtgcacccgtgggccccagggcgacgcggcgggggcggccctagcga

SEQ ID NO: 1550 - RNA, 77 nt, Homo sapiens
  source 1..77: mol_type = genomic RNA
tataggcatgtgccaccacacctggcttaaatgtgtcatttaaaaattcaggccaggcacagtggctcatgcctgta

SEQ ID NO: 1551 - RNA, 77 nt, Homo sapiens; identical to SEQ ID NO: 1550
  source 1..77: mol_type = genomic RNA

SEQ ID NO: 1552 - RNA, 44 nt, Homo sapiens
  source 1..44: mol_type = genomic RNA
tatgttcaacggccatggtatcctgaccgtgcaaaggtagcata

SEQ ID NO: 1553 - RNA, 52 nt, Homo sapiens
  source 1..52: mol_type = genomic RNA
gcagcaaggaaggcaggggtcctaaggtgtgtcctcctgccctccttgctgt

SEQ ID NO: 1554 - RNA, 55 nt, Homo sapiens
  source 1..55: mol_type = genomic RNA
ctgttttgataacagtaatgtccctttagttcaaagttaccagctatcaaaacaa

SEQ ID NO: 1555 - RNA, 91 nt, Homo sapiens
  source 1..91: mol_type = genomic RNA
cttgccatgtaaatacagatttaattaacatttgcaacctgtgaagatgcaaaactttaagtgttaattaaacctctatttacatagcaag

SEQ ID NO: 1556 - RNA, 49 nt, Homo sapiens
  source 1..49: mol_type = genomic RNA
ctgtaatataaatttaatttattctctatcattaaaaaatgtattacag

SEQ ID NO: 1557 - RNA, 75 nt, Homo sapiens
  source 1..75: mol_type = genomic RNA
caggggtttggggaaacggccgctgagtgaggcgtcggctgtgtttctcaccgcggtcttttcctcccactcttg

SEQ ID NO: 1558 - RNA, 91 nt, Homo sapiens
  source 1..91: mol_type = genomic RNA
ttttcaaagcaatgtgtgacaggtacagggacaaatcccgttaataagtaagaggatttgtgcttggctctgtcacatgccactttgaaaa

SEQ ID NO: 1559 - RNA, 80 nt, Homo sapiens
  source 1..80: mol_type = genomic RNA
cctccatgctcctagtcccttccttgaagcggtcggataatcacatgacgagcctcaagcaagggacttcaagctggtgg

SEQ ID NO: 1560 - RNA, 100 nt, Homo sapiens
  source 1..100: mol_type = genomic RNA
actgtcatcccactgcttccagcttccatgactcctgatggaggaatcacatgaattcatcagaattcatggaggctagaagcagtatgaggatcattta

SEQ ID NO: 1561 - RNA, 80 nt, Homo sapiens
  source 1..80: mol_type = genomic RNA
gacctaggctaggggttcttagcataggaggtcttcccatgctaagaagtcctcccatgccaagaactcccagactagga

SEQ ID NO: 1562 - RNA, 80 nt, Homo sapiens
  source 1..80: mol_type = genomic RNA
gctctgatttacttctgtccggcatggtgaacagcaggattggctgtagctgttctctttgccaaggacagatctgatct

SEQ ID NO: 1563 - RNA, 89 nt, Homo sapiens
  source 1..89: mol_type = genomic RNA
gtgttcttccagtccgccctctgtcaccttgcagacggctttctctccgaatgtctgcaagtgtcagaggcgaggagtggcagctgcat

SEQ ID NO: 1564 - RNA, 93 nt, Homo sapiens
  source 1..93: mol_type = genomic RNA
gtgcttcctgcgggctgagcgcgggctgagcgctgccagtcagcgctcacattaaggctgacagcgccctgcctggctcggccggcgaagctc

SEQ ID NO: 1565 - RNA, 96 nt, Homo sapiens
  source 1..96: mol_type = genomic RNA
gtgctgcaggtgttggagagcagtgtgtgttgcctggggactgtgtggactggtatcacccagacagcttgcactgactccagaccctgccgtcat

SEQ ID NO: 1566 - RNA, 87 nt, Homo sapiens
  source 1..87: mol_type = genomic RNA
cagacgtgtcatccccagatacaatggacaatatgctattataatcgtatggcattgtccttgctgtttggagataatactgctgac

SEQ ID NO: 1567 - RNA, 84 nt, Homo sapiens
  source 1..84: mol_type = genomic RNA
atggtccctcccaatccagccattcctcagaccaggtggctcccgagccaccccaggctgtaggatgggggtgagaggtgctag

SEQ ID NO: 1568 - RNA, 81 nt, Homo sapiens
  source 1..81: mol_type = genomic RNA
ggacaggcacctgaggctctgttagccttggctctgggtcctgctccttagagcagaggcagagaggctcagggtctgtct

SEQ ID NO: 1569 - RNA, 105 nt, Homo sapiens
  source 1..105: mol_type = genomic RNA
gcccccttttcacgcatttgtgttttaccacctccaggagactgcccaaagactcttcagtatcatggagttggtaaagcacagatgcatgaataattcaacgtg

SEQ ID NO: 1570 - RNA, 110 nt, Homo sapiens
  source 1..110: mol_type = genomic RNA
accttcctgaaagaggttggggcaggcagtgactgttcagacgtccaatctctttgggacgcctcttcagcgctgtcttccctgcctctgcctttaggacgagtctcaaa

SEQ ID NO: 1571 - RNA, 90 nt, Homo sapiens
  source 1..90: mol_type = genomic RNA
ggcgcctctgcagctccggctccccctggcctctcgggaactacaagtcccagggggcctggcggtgggcggcgggcggaagaggcgggg

SEQ ID NO: 1572 - RNA, 69 nt, Homo sapiens
  source 1..69: mol_type = genomic RNA
ggtgttagggccaacatctcttggtctttcccctgtggtcccaagatggctgttgcaacttaacgccat

SEQ ID NO: 1573 - RNA, 88 nt, Homo sapiens
  source 1..88: mol_type = genomic RNA
ggagctcagccacagatgtccagccacaattctcggttggccgcagactcgtacaagaattgcgtttggacaatcagtggcgaagccc

SEQ ID NO: 1574 - RNA, 66 nt, Homo sapiens
  source 1..66: mol_type = genomic RNA
ggtctggctgttgtggtgtgcaaaactccgtacattgctattttgccacactgcaacaccttacag

SEQ ID NO: 1575 - RNA, 79 nt, Homo sapiens
  source 1..79: mol_type = genomic RNA
ctgccctcttcaacaaaatcactgatgctggagtcgcctgagtcatcactcagcaccaggatattgttggagaggacag

SEQ ID NO: 1576 - RNA, 81 nt, Homo sapiens
  source 1..81: mol_type = genomic RNA
gctcgactcctgttcctgctgaactgagccagtgtgtaaaatgagaactgatatcagctcagtaggcaccggagggcgggt

SEQ ID NO: 1577 - RNA, 68 nt, Homo sapiens
  source 1..68: mol_type = genomic RNA
tctgaatatgggtttactagttggtggtgaattcatgagtcgccaactattaggcctttatgtccaga

SEQ ID NO: 1578 - RNA, 74 nt, Homo sapiens
  source 1..74: mol_type = genomic RNA
ctttattgagtccctactatgttccaggcactgggtatcgtaggtgcctggaacatagtagggactcaataaag

SEQ ID NO: 1579 - RNA, 68 nt, Homo sapiens
  source 1..68: mol_type = genomic RNA
tattgagtccctactatgttccaggcacctacgatacccagtgcctggaacatagtagggactcaata

SEQ ID NO: 1580 - RNA, 78 nt, Homo sapiens
  source 1..78: mol_type = genomic RNA
ccctaaagggccagacactatacgagtcatataagggaaggcattataggactcatatagtgccaggtgttttgtggg

SEQ ID NO: 1581 - RNA, 75 nt, Homo sapiens
  source 1..75: mol_type = genomic RNA
cacactacaataattttcataatgcaatcacacataatcactatgtgactgcattatgaaaattcttgtagtgtg

SEQ ID NO: 1582 - RNA, 73 nt, Homo sapiens
  source 1..73: mol_type = genomic RNA
acactacaataattttcataatgcaatcacacataatcactatgtgactgcattatgaaaattcttgtagtgt

SEQ ID NO: 1583 - RNA, 75 nt, Homo sapiens; identical to SEQ ID NO: 1581
  source 1..75: mol_type = genomic RNA

SEQ ID NO: 1584 - RNA, 75 nt, Homo sapiens
  source 1..75: mol_type = genomic RNA
catactacaataattttcataatgcaatcacacacaatcaccgtgtgactgcattatgaaaattcttctagtgtg

SEQ ID NO: 1585 - RNA, 76 nt, Homo sapiens
  source 1..76: mol_type = genomic RNA
cacacatacaataatattcataatgcaatcacacacaatcaccatgtgactgcattatgaaaattcttctagtgtg

SEQ ID NO: 1586 - RNA, 75 nt, Homo sapiens; identical to SEQ ID NO: 1584
  source 1..75: mol_type = genomic RNA

SEQ ID NO: 1587 - RNA, 85 nt, Homo sapiens
  source 1..85: mol_type = genomic RNA
attaactctggcttttaactttgatggcaaaggggtagctaaacaatctatgtctttgccatcaaagttaaaagccatagttaat

SEQ ID NO: 1588 - RNA, 85 nt, Homo sapiens
  source 1..85: mol_type = genomic RNA
attaactatggcttttaactttgatggcaaagacatagattgtttagctacccctttgccatcaaagttaaaagccagagttaat

SEQ ID NO: 1589 - RNA, 81 nt, Homo sapiens
  source 1..81: mol_type = genomic RNA
gtcatgtgactgcctgtctgtgcctgctgtacaggtgagcggatgttctgcacagcaagtgtagacaggcagacacatgac

SEQ ID NO: 1590 - RNA, 77 nt, Homo sapiens
  source 1..77: mol_type = genomic RNA
aaatggttatgtcctttgcctattctatttaagacaccctgtaccttaaatagagtaggcaaaggacagaaacattt

SEQ ID NO: 1591 - RNA, 73 nt, Homo sapiens
  source 1..73: mol_type = genomic RNA
accagctctgttgggacaagaggacggtcttcttttggaaggaagaccatcatcttgtccgaagagagctggt

SEQ ID NO: 1592 - RNA, 75 nt, Homo sapiens
  source 1..75: mol_type = genomic RNA
atggatttgattgaatgattctcccatttccacatggagagtggagcccagagaattgtttaatcatgtatccat

SEQ ID NO: 1593 - RNA, 67 nt, Homo sapiens
  source 1..67: mol_type = genomic RNA
gcgggcttcgcgggcgaaggcaaagtcgatttccaaaagtgactttcctcactcccgtgaagtcggc

SEQ ID NO: 1594 - RNA, 78 nt, Homo sapiens
  source 1..78: mol_type = genomic RNA
gagaatgggtagaggaagctgtggagagaactcacggtgcctgtggttcgagatccccgccttcctcctcctttcctc

SEQ ID NO: 1595 - RNA, 74 nt, Homo sapiens
  source 1..74: mol_type = genomic RNA
atgattatatgagggacagatgccagaagcactggttatgatttgcatctggcatccgtcacacagataattat

SEQ ID NO: 1596 - RNA, 76 nt, Homo sapiens
  source 1..76: mol_type = genomic RNA
ggccaggcccatcagggcttgtggaatgggaaggagaagggacgcttccccttctgcaggcctgctgggtgtggct

SEQ ID NO: 1597 - RNA, 66 nt, Homo sapiens
  source 1..66: mol_type = genomic RNA
ttcctctggcaagtaaaaaactctcattttccttaaaaaatgagagttttttacttgcaataggaa

SEQ ID NO: 1598 - RNA, 76 nt, Homo sapiens
  source 1..76: mol_type = genomic RNA
gtacttgggcagtagtgtagagattggtttgcctgttaatgaattcaaactaatctctacactgctgcccaagagc

SEQ ID NO: 1599 - RNA, 75 nt, Homo sapiens
  source 1..75: mol_type = genomic RNA
cttgtcatgtcttacccagtctccggtgcagcctgttgtcaaggctgcaccggagactgggtaagacatgacaag

SEQ ID NO: 1600 - RNA, 75 nt, Homo sapiens
  source 1..75: mol_type = genomic RNA
cttgtcatgtcttacccagtctccggtgcagccttgacaacaggctgcaccggagactgggtaagacatgacaag

SEQ ID NO: 1601 - RNA, 63 nt, Homo sapiens
  source 1..63: mol_type = genomic RNA
gagtcgaggactggtggaagggcctttcccctcagaccaaggccctggccccagcttcttctc

SEQ ID NO: 1602 - RNA, 75 nt, Homo sapiens
  source 1..75: mol_type = genomic RNA
ggtgggatgggtagagaaggagctcagaggacggtgcgccttgtttcccttgagccctccctctctcatcccacc

SEQ ID NO: 1603 - RNA, 78 nt, Homo sapiens
  source 1..78: mol_type = genomic RNA
cagaaattgtaaagaactcttaaaacccaatagtaaaaagacaacctgttgagttttaagagttctttatatattctg

SEQ ID NO: 1604 - RNA, 74 nt, Homo sapiens
  source 1..74: mol_type = genomic RNA
tgtatccaatgtgtagtcttttatccctcacatggagtaaaatatgatggataaaagactacatattgggtaca

SEQ ID NO: 1605 - RNA, 77 nt, Homo sapiens
  source 1..77: mol_type = genomic RNA
tcactttggtgcctaggctgagactgcagtggtgcaatctcagttcactgcagccttgacctcctgggctcaggtga

SEQ ID NO: 1606 - RNA, 68 nt, Homo sapiens
  source 1..68: mol_type = genomic RNA
tgcccaggctggagcgagtgcagtggtgcagtcagtcctagctcactgcagcctcgaactcctgggct

SEQ ID NO: 1607 - RNA, 78 nt, Homo sapiens
  source 1..78: mol_type = genomic RNA
aatatgaaactgactgaataggtagggtcatttttctgtgactgcacatggcccaacctattcagttagttccatatt

SEQ ID NO: 1608 - RNA, 75 nt, Homo sapiens
  source 1..75: mol_type = genomic RNA
tacaggtctgtagcctgggagcaatggggtgtatggtataggggtagcctcgtgctcctgggctacaaacctgta

SEQ ID NO: 1609 - RNA, 82 nt, Homo sapiens
  source 1..82: mol_type = genomic RNA
ccctcctcggcacttcccccacctcactgcccgggtgcccacaagactgtggacagtgaggtagagggagtgccgaggaggg

SEQ ID NO: 1610 - RNA, 76 nt, Homo sapiens
  source 1..76: mol_type = genomic RNA
ggctcagagtaggagctcaacagatgcctgttgactgaataataaacaggtatcgcaggagcttttgttatgtgcc

SEQ ID NO: 1611 - RNA, 90 nt, Homo sapiens
  source 1..90: mol_type = genomic RNA
cctcttgaggtacctgaattaccaaaagctttatgtattctgaagttattgaaaataagagcttttgggaattcaggtagttcaggagtg

SEQ ID NO: 1612 - RNA, 61 nt, Homo sapiens
  source 1..61: mol_type = genomic RNA
tcacccggtgagggcgggtggaggaggagggtccccaccatcagccttcactgggacggga

SEQ ID NO: 1613 - RNA, 82 nt, Homo sapiens
  source 1..82: mol_type = genomic RNA
ttcagaaaggcctttctgaaccttcagaaaggctgctgaatcttcagaaaggcctttctgaaccttcagaaaggctgctgaa

SEQ ID NO: 1614 - RNA, 63 nt, Homo sapiens
  source 1..63: mol_type = genomic RNA
tagataacattgtaaagcgcttctttcgcggttgggctggagcaactctttacaatgtttcta

SEQ ID NO: 1615 - RNA, 79 nt, Homo sapiens
  source 1..79: mol_type = genomic RNA
aactacactttaaggggaccaaagagatatatagatatcagctacctatatacctgttcggtctctttaaagtgtagtt

SEQ ID NO: 1616 - RNA, 82 nt, Homo sapiens
  source 1..82: mol_type = genomic RNA
tatatgagttcaactccaaacactcaaaactcattgttgaatggaatgagatattttgagtgtttggaattgaactcgtata

SEQ ID NO: 1617 - RNA, 79 nt, Homo sapiens
  source 1..79: mol_type = genomic RNA
gctaagtcccttctttctatcctagtataacttgaagaattcaaatagtcatgctaggatagaaagaatgggacttggc

SEQ ID NO: 1618 - RNA, 66 nt, Homo sapiens
  source 1..66: mol_type = genomic RNA
gtccgggttgggcagtgaggagggtgtgacgccgcgaagtgcacctcgcccttgtccaactcggac

SEQ ID NO: 1619 - RNA, 77 nt, Homo sapiens
  source 1..77: mol_type = genomic RNA
gagttaagatggaaaaaactggtgtgtgcttattgatgtagccaacaagcatacatcagttttttccaacttaactc

SEQ ID NO: 1620 - RNA, 83 nt, Homo sapiens
  source 1..83: mol_type = genomic RNA
atacatacatgtacacacacatgtcatccacacacatacatatatatatgtttgtatggatatgtgtgtgtatgtgtgtgtat

SEQ ID NO: 1621 - RNA, 80 nt, Homo sapiens
  source 1..80: mol_type = genomic RNA
gggaagcaggccaacctcgacgatctcctcagcacctgaacgccaaggctggggagatcctcgaggttggcctgctttcc

SEQ ID NO: 1622 - RNA, 86 nt, Homo sapiens
  source 1..86: mol_type = genomic RNA
gagggaaagcaggccaacctcgaggatctccccagccttggcgttcaggtgctgaggagatcgtcgaggttggcctgcttcccctc

SEQ ID NO: 1623 - RNA, 76 nt, Homo sapiens
  source 1..76: mol_type = genomic RNA
ggggtgatgggtggggcaatgggatcaggtgcctcaaagggcatcccacctgatcccacagcccacctgtcacccc

SEQ ID NO: 1624 - RNA, 74 nt, Homo sapiens
  source 1..74: mol_type = genomic RNA
gtgcagagttattgcctctgttctaacacaagactaggcttccctgtgttagaataggggcaataactctgcac

SEQ ID NO: 1625 - RNA, 82 nt, Homo sapiens
  source 1..82: mol_type = genomic RNA
gacaaattttaaatgtccctgtccccttccccccaattaaagtagattgggggaaagcgagtagggacatttaaaatttgtt

SEQ ID NO: 1626 - RNA, 84 nt, Homo sapiens
  source 1..84: mol_type = genomic RNA
ggcccctccttctcagccccagctcccgctcacccctgccacgtcaaaggaggcagaaggggagttgggagcagagaggggacc

SEQ ID NO: 1627 - RNA, 82 nt, Homo sapiens
  source 1..82: mol_type = genomic RNA
tccgggcatcacctcccactgcagagcctggggagccggacagctcccttcccaggctctgcagtgggaactgatgcctgga

SEQ ID NO: 1628 - RNA, 56 nt, Homo sapiens
  source 1..56: mol_type = genomic RNA
ccactgcagagcctgggaagggagctgtccggctccccaggctctgcagtgggagt

SEQ ID NO: 1629 - RNA, 75 nt, Homo sapiens
  source 1..75: mol_type = genomic RNA
gcagaagaaagatctggaagtgggagacacttttactatatatagtggctcccacttccagatctttctctctgt

SEQ ID NO: 1630 - RNA, 77 nt, Homo sapiens
  source 1..77: mol_type = genomic RNA
tgcagaagaaagatctggaagtgggagacactttcactatatatagtggctcccacttccagatctttctctctgta

SEQ ID NO: 1631 - RNA, 77 nt, Homo sapiens
  source 1..77: mol_type = genomic RNA
tgcagaagaaagatctggaagtgggagacactttcactatatatagtggctcccacttcctgatctttctctctgta

SEQ ID NO: 1632 - RNA, 85 nt, Homo sapiens
  source 1..85: mol_type = genomic RNA
gggaagggcttcagccaggctagtgcagtctgctttgtgccaacactggggtgatgactgccctagtctagctgaagcttttccc

SEQ ID NO: 1633 - RNA, 81 nt, Homo sapiens
  source 1..81: mol_type = genomic RNA
attcaggccggtcctgcagagaggaagcccttctgcttacaggtattggaagggcttcctctctgcaggaccggcctgaat

SEQ ID NO: 1634 - RNA, 81 nt, Homo sapiens
  source 1..81: mol_type = genomic RNA
attcaggccggtcctgcagagaggaagcccttccaatacctgtaagcagaagggcttcctctctgcaggaccggcctgaat

SEQ ID NO: 1635 - RNA, 74 nt, Homo sapiens
  source 1..74: mol_type = genomic RNA
ccaaagtcctaggattacaagtgtcggccacgggctgggcacagtggctcacgcctgtaatcccagcattttgg

SEQ ID NO: 1636 - RNA, 85 nt, Homo sapiens
  source 1..85: mol_type = genomic RNA
ggacctgccctgggctttctagtctcagctctcctccagctcagctggtcaggagagctgagactagaaagcccagggcaggttc

SEQ ID NO: 1637 - RNA, 81 nt, Homo sapiens
  source 1..81: mol_type = genomic RNA
acctgccctgggctttctagtctcagctctcctgaccagctgagctggaggagagctgagactagaaagcccagggcaggt

SEQ ID NO: 1638 - RNA, 77 nt, Homo sapiens
  source 1..77: mol_type = genomic RNA
cctcgagagctgataagaacagaggcccagattgaagttgaatagtgctgggcctttgtttttaccaagttccctgg

SEQ ID NO: 1639 - RNA, 82 nt, Homo sapiens
  source 1..82: mol_type = genomic RNA
ctgacttttttagggagtagaagggtggggagcatgaacaatgtttctcactccctacccctccactccccaaaaaagtcag

SEQ ID NO: 1640 - RNA, 73 nt, Homo sapiens
  source 1..73: mol_type = genomic RNA
ttcctcatctataaaatgagggcagtaagaccttccttccttgtcttactacccccattttatagatgaggaa

SEQ ID NO: 1641 - RNA, 83 nt, Homo sapiens
  source 1..83: mol_type = genomic RNA
cttggaaactgtgactttaagggaaatggcgcacagcagaccctgcaatcatgccgttttgcttgaagtcgcagtttcccagg

SEQ ID NO: 1642 - RNA, 75 nt, Homo sapiens
  source 1..75: mol_type = genomic RNA
ccggtggcaaggtggatgcaatgtgacctcaactcttggtcctctgaggtcacattgtatccaccttaccactgg

SEQ ID NO: 1643 - RNA, 92 nt, Homo sapiens
  source 1..92: mol_type = genomic RNA
aaatttttttgaggccagtaggcattgtctgcgttaggatttctgtatcatcctcctaacgcagacaatgcctactggcctaagaaaaattt

SEQ ID NO: 1644 - RNA, 85 nt, Homo sapiens
  source 1..85: mol_type = genomic RNA
ggctgtggaggcaccagtatttctgaaattcttttttctgaaattcttcaggaaggatttcagaaatactggtgtcccgacagcc

SEQ ID NO: 1645 - RNA, 82 nt, Homo sapiens
  source 1..82: mol_type = genomic RNA
aagatcatgagttctacagtcagacagcctgagttggaggctcatcttcacttcttgctgtgtgaccctgggccagtgactt

SEQ ID NO: 1646 - RNA, 83 nt, Homo sapiens
  source 1..83: mol_type = genomic RNA
atgtgaaaacataggactgtgcttggcacatagcacaaagtcttatggtactgtgtgccaagcatagtcctgtgtttttacat

SEQ ID NO: 1647 - RNA, 77 nt, Homo sapiens
  source 1..77: mol_type = genomic RNA
ctggtaacactggggttctgagacagacagtgttagctccagaagcattgcctgtcttagaacccctatgttaccag

SEQ ID NO: 1648 - RNA, 74 nt, Homo sapiens
  source 1..74: mol_type = genomic RNA
tatatatagagatgtatggaatctgtatatatctatatatatgtgtatatatagattccataaatctatatatg

SEQ ID NO: 1649 - RNA, 68 nt, Homo sapiens
  source 1..68: mol_type = genomic RNA
tccctgccctgcctgttttctcctttgtgattttatgagaacaaaggaggaaataggcaggccaggga

SEQ ID NO: 1650 - RNA, 87 nt, Homo sapiens
  source 1..87: mol_type = genomic RNA
gttacctggtagtgagttagagatgcagagccctgggctcctcagcaaacctactggatctgcattttaattcacatgcatggtaat

SEQ ID NO: 1651 - RNA, 77 nt, Homo sapiens
  source 1..77: mol_type = genomic RNA
cctggggggcggggagagaacgcagtgacgtctggccgcgtgcgcatgtcgggcgctttctcctccccctacccagg

SEQ ID NO: 1652 - RNA, 90 nt, Homo sapiens
  source 1..90: mol_type = genomic RNA
tggcctctccagtctgcagctcccggcagcctcgggccacactcccgggatccccagggactggcctgggactaccgggggtggcggccg

SEQ ID NO: 1653 - RNA, 82 nt, Homo sapiens
  source 1..82: mol_type = genomic RNA
ccacgtgccatgtgtacacacgtgccaggcgctgtcttgagacattcgcgcagtgcacggcactggggacacgtggcactgg

SEQ ID NO: 1654 - RNA, 84 nt, Homo sapiens
  source 1..84: mol_type = genomic RNA
gaggctgggcggggcgcggccggatcggtcgagagcgtcctggctgatgacggtctcccgtgcccacgccccaaacgcagtctc

SEQ ID NO: 1655 - RNA, 84 nt, Homo sapiens
  source 1..84: mol_type = genomic RNA
caggatcacagacgtttaaattacactccttctgctgtgccttacagcagtagaaggggtgaaatttaaacgtctgtgatcctg

SEQ ID NO: 1656 - RNA, 84 nt, Homo sapiens; identical to SEQ ID NO: 1655
  source 1..84: mol_type = genomic RNA

SEQ ID NO: 1657 - RNA, 84 nt, Homo sapiens; identical to SEQ ID NO: 1655
  source 1..84: mol_type = genomic RNA

SEQ ID NO: 1658 - RNA, 94 nt, Homo sapiens
  source 1..94: mol_type = genomic RNA
cagtgcgacgggcggagcttccagacgctccgccccacgtcgcatgcgccccgggaaagcgtggggcggagcttccggaggccccgccctgctg

SEQ ID NO: 1659 - RNA, 88 nt, Homo sapiens
  source 1..88: mol_type = genomic RNA
gcgacgggcggagcttccagacgctccgccccacgtcgcatgcgccccgggaaagcgtggggcggagcttccggaggccccgccctgc

SEQ ID NO: 1660 - RNA, 94 nt, Homo sapiens; identical to SEQ ID NO: 1658
  source 1..94: mol_type = genomic RNA

SEQ ID NO: 1661 - RNA, 153 nt, Homo sapiens
  source 1..153: mol_type = genomic RNA
gctccgccccacgtcgcatgcgccccgggaacgcgtggggcggagcttccggaggccccgctctgctgccgaccctgtggagcggagggtgaagcctccggatgccagtccctcatcgctggcctggtcgcgctgtggcgaagggggcggagc

SEQ ID NO: 1662 - RNA, 153 nt, Homo sapiens
  source 1..153: mol_type = genomic RNA
gctccgccccacgtcgcatgcgccccgggaacgcgtggggcggagcttccggaggccccgccctgctgccgaccctgtggagcggagggtgaagcctccggatgccagtccctcatcgctggcccggtcgcgctgtggcgaagggggcggagc

SEQ ID NO: 1663 - RNA, 73 nt, Homo sapiens
  source 1..73: mol_type = genomic RNA
cggcgaccatcgggccctcggcgccggcccgttagttgcccgggcccgagccggccgggcccgcgggttgccg

SEQ ID NO: 1664 - RNA, 63 nt, Homo sapiens
  source 1..63: mol_type = genomic RNA
gctgcttctgtagtgtagtccgtgcatccgcccttcgatgcttgggttggatcatagagcagt

SEQ ID NO: 1665 - RNA, 84 nt, Homo sapiens
  source 1..84: mol_type = genomic RNA
ctctgccctgcctctctcggagtcgctcggagcagtcacgttgacggaatcctccggcgcctcctcgagggaggagaggcaggg

SEQ ID NO: 1666 - RNA, 75 nt, Homo sapiens
  source 1..75: mol_type = genomic RNA
aagcaagactgaggggcctcagaccgagcttttggaaaatagaaaagtctcgctctctgcccctcagcctaactt

SEQ ID NO: 1667 - RNA, 68 nt, Homo sapiens
  source 1..68: mol_type = genomic RNA
gaatggaagaagaaggcggtcggtctgcgggagccaggccgcagagccatccgccttctgtccatgtc

SEQ ID NO: 1668 - RNA, 85 nt, Homo sapiens
  source 1..85: mol_type = genomic RNA
agcctgcggttccaacaggcgtctgtctacgtggcttcaaccaagttcaaagtcacgcggagagatggctttggaaccaggggct

SEQ ID NO: 1669 - RNA, 70 nt, Homo sapiens
  source 1..70: mol_type = genomic RNA
gctggccctgggcagcgtgtggctgaaggtcaccatgttctccttggccatggggctgcgcggggccagc

SEQ ID NO: 1670 - RNA, 85 nt, Homo sapiens
  source 1..85: mol_type = genomic RNA
ggcgcctcctgctctgctgtgccgccagggcctcccctagcgcgccttctggagaggctttgtgcggatacggggctggaggcct

SEQ ID NO: 1671 - RNA, 73 nt, Homo sapiens
  source 1..73: mol_type = genomic RNA
gcctcagttgccccatctgtgccctgggtaggaatatcctggatccccttgggtctgatggggtagccgatgc

SEQ ID NO: 1672 - RNA, 80 nt, Homo sapiens
  source 1..80: mol_type = genomic RNA
ctggggtcacctgtctggccagctacgtccccacggcccttgtcagtgtggaaggtagacggccagagaggtgaccccgg

SEQ ID NO: 1673 - RNA, 76 nt, Homo sapiens
  source 1..76: mol_type = genomic RNA
ggggtcacctctctggccgtctaccttccacactgacaagggccgtggggacgtagctggccagacaggtgacccc

SEQ ID NO: 1674 - RNA, 77 nt, Homo sapiens
  source 1..77: mol_type = genomic RNA
ggaagggattctgggaggttgtagcagtggaaaaagttcttttcttcctctgatcgccctctcagctctttccttct

SEQ ID NO: 1675 - RNA, 55 nt, Homo sapiens
  source 1..55: mol_type = genomic RNA
tcctgcgtaggatctgaggagtggacgagtctcattacccagctcctgagcagga

SEQ ID NO: 1676 - RNA, 73 nt, Homo sapiens
  source 1..73: mol_type = genomic RNA
aggtggcagggccagccaccaggagggctgcgtgccacccgggcagctctgctgctcactggcagtgtcacct

SEQ ID NO: 1677 - RNA, 84 nt, Homo sapiens
  source 1..84: mol_type = genomic RNA
ccgcagccgccgcgccgggcccgggttggccgctgacccccgcggggcccccggcggccggggcgggggcgggggctgccccgg

SEQ ID NO: 1678 - RNA, 64 nt, Homo sapiens
  source 1..64: mol_type = genomic RNA
gggtgggggcggggcggcaggggcctcccccagtgccaggccccattctgcttctctcccagct

SEQ ID NO: 1679 - RNA, 73 nt, Homo sapiens
  source 1..73: mol_type = genomic RNA
ggcgaggggaggcgcaggctcggaaaggcgcgcgaggctccaggctccttcccgatccaccgctctcctcgct

SEQ ID NO: 1680 - RNA, 80 nt, Homo sapiens
  source 1..80: mol_type = genomic RNA
gactgtgctctcactgttcacccagcactagcagtaccagacggttctgtggagtcctggggaatggagagagcacagtc

SEQ ID NO: 1681 - RNA, 80 nt, Homo sapiens
  source 1..80: mol_type = genomic RNA
gactctgctctcactgttcacccagcactagcagtaccagatggttctgtggagtcctggggaatggagagagcacagtc

SEQ ID NO: 1682 - RNA, 88 nt, Homo sapiens
  source 1..88: mol_type = genomic RNA
ggtgactccagggactgccttaggagaaagtttctggaagttctgacattccagaaactttctcctaaggcagtccctgggagtcact

SEQ ID NO: 1683 - RNA, 86 nt, Homo sapiens
  source 1..86: mol_type = genomic RNA
gtgactcccagggactgccttaggagaaagtttctggaatgtcagaacttccagaaactttctcctaaggcagtccctggagtcac

SEQ ID NO: 1684 - RNA, 85 nt, Homo sapiens
  source 1..85: mol_type = genomic RNA
ggtggtcgagggaatctgagaaggcgcacaaggtttgtgtccaatacagtccacaccttgcgctactcaggtctgctcgtgccct

SEQ ID NO: 1685 - RNA, 52 nt, Homo sapiens
  source 1..52: mol_type = genomic RNA
gggatatgaagaaaaataagaggctaggattgcctcttatttttacatgccc

SEQ ID NO: 1686 - RNA, 81 nt, Homo sapiens
  source 1..81: mol_type = genomic RNA
tattaatatggaagggagaagagctttaatgattggagtcattttcagagcattaaagctcttctcccttccatattaatg

SEQ ID NO: 1687 - RNA, 79 nt, Homo sapiens
  source 1..79: mol_type = genomic RNA
attaatatggaagggagaagagctttaatgctctgaaaatgactccaatcattaaagctcttctcccttccatattaat

SEQ ID NO: 1688 - RNA, 78 nt, Homo sapiens
  source 1..78: mol_type = genomic RNA
ggcaccattaggtagactgggatttgttgttgagcgcagtaagacaacaacaaaatcactagtcttccagatggggcc

SEQ ID NO: 1689 - RNA, 86 nt, Homo sapiens
  source 1..86: mol_type = genomic RNA
gcgcccgccgggtctagtggtcctaaacatttcacaattgcgctacagaactgttgaactgttaagaaccactggacccagcgcgc

SEQ ID NO: 1690 - RNA, 73 nt, Homo sapiens
  source 1..73: mol_type = genomic RNA
cagtagctatttagtgtgataatggcgtttgatagtttagacacaaacaccattgtcacactccacagctctg

SEQ ID NO: 1691 - RNA, 100 nt, Homo sapiens
  source 1..100: mol_type = genomic RNA
actttatacgtgtaattgtgatgaggatggatagcaaggaagccgctcccacctgaccctcacggcctccgtgttacctgtcctctaggtgggacgctcg

SEQ ID NO: 1692 - RNA, 63 nt, Homo sapiens
  source 1..63: mol_type = genomic RNA
ttgttgctatctaggttagtgaaggctattttaatttttttaaaatttctttcactacttagg

SEQ ID NO: 1693 - RNA, 79 nt, Homo sapiens
  source 1..79: mol_type = genomic RNA
aaggttgcggtgcatgtgatgaagcaaatcagtatgaatgaattcatgatactgtaaacgctttctgatgtactactca

SEQ ID NO: 1694 - RNA, 80 nt, Homo sapiens
  source 1..80: mol_type = genomic RNA
gtaacagtaacttttattctcattttccttttctctaccttgtagagaagcaaagtgatgagtaatactggctggagccc

SEQ ID NO: 1695 - RNA, 73 nt, Homo sapiens
  source 1..73: mol_type = genomic RNA
aagagccgcggcgtaacggcagccatcttgtttgtttgagtgaatcggaaaggaggcgccggctgtggcggcg

SEQ ID NO: 1696 - RNA, 83 nt, Homo sapiens
  source 1..83: mol_type = genomic RNA
agcaggtctaataagaatttctttttcttcacaattatgaaagaaaagaaattgtgaagaaagaaattcttactagttttgct

SEQ ID NO: 1697 - RNA, 87 nt, Homo sapiens
  source 1..87: mol_type = genomic RNA
gggactggggatgaggaggcatcttgagaaatggaaggaatgggatctacttccagttcactagaggcgtcctgacacccctagctc

SEQ ID NO: 1698 - RNA, 87 nt, Homo sapiens
  source 1..87: mol_type = genomic RNA
tggttgggtttggattgttgtacttttttttttgttcgttgcatttttaggaacaaaaaaaaaagcccaacccttcacaccacttca

SEQ ID NO: 1699 - RNA, 86 nt, Homo sapiens
  source 1..86: mol_type = genomic RNA
ggttctgtcttgggccacttggatctgaaggctgcccctttgctctctggggtagccttcagatcttggtgttttgaattcttact

SEQ ID NO: 1700 - RNA, 87 nt, Homo sapiens
  source 1..87: mol_type = genomic RNA
gactctgggacgctcagacgccgcgcggggcggggattggtctgtggtcctctctcggctcctcgcggctcgcggcggccgacggtt

SEQ ID NO: 1701 - RNA, 92 nt, Homo sapiens
  source 1..92: mol_type = genomic RNA
tgtcactccgccagcatcatgaagtgcactcatgatatgtttgccccatcagcgtgtcacgagggcatttcatgatgcaggcggggttggca

SEQ ID NO: 1702 - RNA, 79 nt, Homo sapiens
  source 1..79: mol_type = genomic RNA
aggtcatagaaagacatagttgcaagatgggattagaaaccatatgtctcatcagcaccctatgtcctttctctgccct

SEQ ID NO: 1703 - RNA, 88 nt, Homo sapiens
  source 1..88: mol_type = genomic RNA
taagctgagtgcattgtgatttccaataattgaggcagtggttctaaaagctgtctacattaatgaaaagagcaatgtggccagcttg

SEQ ID NO: 1704 - RNA, 83 nt, Homo sapiens
  source 1..83: mol_type = genomic RNA
acggcatctttgcactcagcaggcaggctggtgcagcccgtggtgggggaccatcctgcctgctgtggggtaaggacggctgt

SEQ ID NO: 1705 - RNA, 79 nt, Homo sapiens
  source 1..79: mol_type = genomic RNA
gtgaggtgggggccagcagggagtgggctgggctgggctgggccaaggtacaaggcctcaccctgcatcccgcacccag

SEQ ID NO: 1706 - RNA, 85 nt, Homo sapiens
  source 1..85: mol_type = genomic RNA
gtgagctgctggggacgcgggtcggggtctgcagggcggtgcggcagccgccacctgacgccgcgcctttgtctgtgtcccacag

SEQ ID NO: 1707 - RNA, 83 nt, Homo sapiens
  source 1..83: mol_type = genomic RNA
aatagagggtgcacaggcacgggagctcaggtgaggcagggagctgagctcacctgacctcccatgcctgtgcaccctctatt

SEQ ID NO: 1708 - RNA, 95 nt, Homo sapiens
  source 1..95: mol_type = genomic RNA
agtgatataatagagggtgcacaggcatgggaggtcaggtgagctcagctccctgcctcacctgagctcccgtgcctgtgcaccctctattggct

SEQ ID NO: 1709 - RNA, 84 nt, Homo sapiens
  source 1..84: mol_type = genomic RNA
ttcagtaggttgggttcatttcattttcatgacaaccctatatgggaaaatgttgtgaaaatgaaatgagcccagcccattgaa

SEQ ID NO: 1710 - RNA, 180 nt, Homo sapiens
  source 1..180: mol_type = genomic RNA
cgcgactgcggcggcggtggtggggggagccgcggggatcgccgagggccggtcggccgccccgggtgccgcgcggtgccgccggcggcggtgaggccccgcgcgtgtgtcccggctgcggtcggccgcgctcgaggggtccccgtggcgtccccttccccgccggccgcctttctcgcg

SEQ ID NO: 1711 - RNA, 66 nt, Homo sapiens
  source 1..66: mol_type = genomic RNA
gcttggaacaggcacctgtgtgtgcccaagtgtttctagcaaacacagggacctgagtgtctaagc

SEQ ID NO: 1712 - RNA, 60 nt, Homo sapiens
  source 1..60: mol_type = genomic RNA
tcaaggtgtgtctgtagagtcctgactgcgtgccaggggctctgtctggcacatttctga

SEQ ID NO: 1713 - RNA, 90 nt, Homo sapiens
  source 1..90: mol_type = genomic RNA
gattcgatgggccatagcaatcctgtgatttatgcatggaggctgcttctcctcagcagctgccatagcccggtcgctggtacatgattc

SEQ ID NO: 1714 - RNA, 131 nt, Homo sapiens
  source 1..131: mol_type = genomic RNA
cggctggaggtgtgaggatccgaacccaggggtggggggtggaggcggctcctgcgatcgaaggggacttgagactcaccggccgcacgccatgagggccctgtgggtgctgggcctctgctgcgtcctgc

SEQ ID NO: 1715 - RNA, 110 nt, Homo sapiens
  source 1..110: mol_type = genomic RNA
tccctggggacccctggcagcccctcctgatgattcttcttcctgagcacgctcatgatgagcaaactgagcctctaagaagttgactgaaggggctgcttccccaagga

SEQ ID NO: 1716 - RNA, 56 nt, Homo sapiens
  source 1..56: mol_type = genomic RNA
ttcatgagctgcaatctcatcactggaatgttccagcgactggacaagctgaggaa

SEQ ID NO: 1717 - RNA, 83 nt, Homo sapiens
  source 1..83: mol_type = genomic RNA
gcttgtcgctgcggtgttgctgttggagactcgattgttggtgacagcgaaagaacgataacaaaatgccggagcgagatagt

SEQ ID NO: 1718 - RNA, 69 nt, Homo sapiens
  source 1..69: mol_type = genomic RNA
ctttcggccagcgggacggcatccgaggtgggctaggctcgggcccgtggcgggtgcgggggtgggagg

SEQ ID NO: 1719 - RNA, 117 nt, Homo sapiens
  source 1..117: mol_type = genomic RNA
tgtgtcccataattaaataatgaaatctgaaatcaccaataatgggacactaatgtgattaatgttgttgtgtcccattattggtgatttcagatttcatatatgattaaggacata

SEQ ID NO: 1720 - RNA, 56 nt, Homo sapiens
  source 1..56: mol_type = genomic RNA
tatttaagaaaacaccatggagatgaaatgcctttgattttttttttctttttgta

SEQ ID NO: 1721 - RNA, 99 nt, Homo sapiens
  source 1..99: mol_type = genomic RNA
tctacaagcagatacaaggatgcccttgtacacaacacacgtgctgcttgtatagacatgagtgttgtctacgagggcatccttgtgtctgtgtgtgtg

SEQ ID NO: 1722 - RNA, 100 nt, Homo sapiens
  source 1..100: mol_type = genomic RNA
gaaagaagaactggacaaaattaaaatgctcttctgtcattgtaatagttcatatgggcactgacaggagagcattttgactttgtcaagtgtgtctgct

SEQ ID NO: 1723 - RNA, 96 nt, Homo sapiens
  source 1..96: mol_type = genomic RNA
caccttctcgcagaggctcttgacctgggactcggacagctgcttgcactcgttcagctgctcgatccactggtccagctccttggtgaacacctt

SEQ ID NO: 1724 - RNA, 95 nt, Homo sapiens
  source 1..95: mol_type = genomic RNA
tgtgttttcctcaacgctcacagttacacttcttactctcaatccattcatattgaaaatgatgagtagtgactgatgaagcacaaatcagccaa

SEQ ID NO: 1725 - RNA, 97 nt, Homo sapiens
  source 1..97: mol_type = genomic RNA
cccgggaccttggtccaggcgctggtctgcgtggtgctcgggtggataagtctgatctgagcaccacacaggccgggcgccgggaccaagggggctc

SEQ ID NO: 1726 - RNA, 99 nt, Homo sapiens
  source 1..99: mol_type = genomic RNA
ctgtaaacttgaaggtagggaactctgtcttcactcatgagtaccttccaacacgagctctcaggagtaaagacagagttccctaccttcaatgtggat

SEQ ID NO: 1727 - RNA, 105 nt, Homo sapiens
  source 1..105: mol_type = genomic RNA
gcgggcggcggcggcggcagcagcagcaggtgcggggcggcggccgcgctggccgctcgactccgcagctgctcgttctgcttctccagcttgcgcaccagctcc

SEQ ID NO: 1728 - RNA, 111 nt, Homo sapiens
  source 1..111: mol_type = genomic RNA
agtaaggtccgtcagttgtaatgagacccagtgcaagtgtagatgccgactccgtggcagagttcagcgtttcacactgcctggtctctgtcactctattgaattagattg

SEQ ID NO: 1729 - RNA, 74 nt, Homo sapiens
  source 1..74: mol_type = genomic RNA
tgaggatgaaagacccattgaggagaaggttctgctggctgagaaccttcctctccatgggtctttcatcctca

SEQ ID NO: 1730 - RNA, 75 nt, Homo sapiens
  source 1..75: mol_type = genomic RNA
atatatgaaatgtagagattgatcaaaatagtttctatcaaaatagttttgatcaatctctgcaattttatatat

SEQ ID NO: 1731 - RNA, 81 nt, Homo sapiens
  source 1..81: mol_type = genomic RNA
atatatatatacggaatatatatacggaatatatatatacggaatatatatatacggaatatgtatacggaatatatatat

SEQ ID NO: 1732 - RNA, 65 nt, Homo sapiens
  source 1..65: mol_type = genomic RNA
tctagactggtatagctgcttttggagcctcacctgctgagagctcacagctgtccttctctaga

SEQ ID NO: 1733 - RNA, 65 nt, Homo sapiens; identical to SEQ ID NO: 1732
  source 1..65: mol_type = genomic RNA

SEQ ID NO: 1734 - RNA, 88 nt, Homo sapiens
  source 1..88: mol_type = genomic RNA
atgttattgctgctgctgtcacatttacatgaaaataaaatgtaaattattttatttctatcaaataaggactagtctgcagtgatat

SEQ ID NO: 1735 - RNA, 82 nt, Homo sapiens
  source 1..82: mol_type = genomic RNA
tctttgtgattaccatgagactcatgtaaaacatcttagactattacaagatgttttatgagtctcatgataatcacaaaga

SEQ ID NO: 1736 - RNA, 102 nt, Homo sapiens
  source 1..102: mol_type = genomic RNA
atatatatatatggaatgtatatacggaatatatatatatatggaatgtatatacggaatatatatatatatggaatgtatatacggaatatatatatatat

SEQ ID NO: 1737 - RNA, 68 nt, Homo sapiens
  source 1..68: mol_type = genomic RNA
acatcactattgtagaacctaagattggccgtttgagatgtcctttcaagtttttgcatttctgatgt

SEQ ID NO: 1738 - RNA, 73 nt, Homo sapiens
  source 1..73: mol_type = genomic RNA
ggatgataagttatggggcttctgtagagatttctatgagaacatctctaaggaactcccccaaactgaattc

SEQ ID NO: 1739 - RNA, 85 nt, Homo sapiens
  source 1..85: mol_type = genomic RNA
ttggttaaagcgcctgtctagtaaacaggagatcctgggttcgaatcccagcggtgcctccgtgtttcccccacgcttttgccaa

SEQ ID NO: 1740 - RNA, 60 nt, Homo sapiens
  source 1..60: mol_type = genomic RNA
ggcagtggccagagccctgcagtgctgggcatgggcttctcgtgggctctggccacggcc

SEQ ID NO: 1741 - RNA, 94 nt, Homo sapiens
  source 1..94: mol_type = genomic RNA
gaatccggtccgtacaaactctgctgtgttgaatgattggtgagtttgtttgctcattgattgaatcactgcagagtttgtacggaccggattc

SEQ ID NO: 1742 - RNA, 68 nt, Homo sapiens
  source 1..68: mol_type = genomic RNA
cgtggtgaggatatggcagggaaggggagtttccctctattcccttccccccagtaatcttcatcatg

SEQ ID NO: 1743 - RNA, 87 nt, Homo sapiens
  source 1..87: mol_type = genomic RNA
aaatttaaggagggactcactcacaggattgtgcaaatgcaaagttggcttttgcatgaccctgggagtaggtgcctccttaaattt

SEQ ID NO: 1744 - RNA, 87 nt, Homo sapiens; identical to SEQ ID NO: 1743
  source 1..87: mol_type = genomic RNA

SEQ ID NO: 1745 - RNA, 72 nt, Homo sapiens
  source 1..72: mol_type = genomic RNA
acttccagtagtggatgatgcactctgtgcagggccaactgtgcacacagtgcttcatccactactggaagt

SEQ ID NO: 1746 - RNA, 84 nt, Homo sapiens
  source 1..84: mol_type = genomic RNA
taagttatatatgtctacttctacctgtgttatcataataaaggtgtcatgatgatacaggtggaggtagaaatatataactta

SEQ ID NO: 1747 - RNA, 82 nt, Homo sapiens
  source 1..82: mol_type = genomic RNA
gggtgtacaccccctgcgacattggaagtagtatcatctctcccttggatgctacgaacaatatcacagaaggtgtacaccc

SEQ ID NO: 1748 - RNA, 74 nt, Homo sapiens
  source 1..74: mol_type = genomic RNA
aatctaaaggacctgtactaggtttaacatgttgagcattactcatgttagacctagtacacgtcctttagatt

SEQ ID NO: 1749 - RNA, 62 nt, Homo sapiens
  source 1..62: mol_type = genomic RNA
gtacatttcctaccctacctgaagacttgagattatagtctttggggggatgggcaaagtac

SEQ ID NO: 1750 - RNA, 86 nt, Homo sapiens
  source 1..86: mol_type = genomic RNA
ctcacctcattcatttaccttctcttacagatcacttttctgcactggacagtgatctgtaagagaaagtaaatgaaagaggtgag

SEQ ID NO: 1751 - RNA, 61 nt, Homo sapiens
  source 1..61: mol_type = genomic RNA
cgcgcgtgcgcccgagcgcggcccggtggtccctcccggacaggcgttcgtgcgacgtgtg

SEQ ID NO: 1752 - RNA, 93 nt, Homo sapiens
  source 1..93: mol_type = genomic RNA
tcttcactttcaagagtggcaaagtctttccatatgtatgtatgtatgtctgttacacatatggaaagactttgccactctttaaagtgaaga

SEQ ID NO: 1753 - RNA, 87 nt, Homo sapiens
  source 1..87: mol_type = genomic RNA
tcactttaaagagtggcaaagtctttccatatgtgtaacagacatacatacatacatatggaaagactttgccactcttgaaagtga

SEQ ID NO: 1754 - RNA, 78 nt, Homo sapiens
  source 1..78: mol_type = genomic RNA
cctgggaggtgtgatatcatggttcctgggaggtgtgatcctgtgcttcctgggaggtgtgatatcgtggttcctggg

SEQ ID NO: 1755 - RNA, 148 nt, Homo sapiens
  source 1..148: mol_type = genomic RNA
gatcctgtgctccctggggggtctgatcctgtgcttcctgggaggtgtgatatcatggttcctgggaggtgtgatcccgtgcttcctgggaggtgtgatattgtggttcctgggaggtgtgatcccgtgctccctgggaggtgtgatc

SEQ ID NO: 1756 - RNA, 72 nt, Homo sapiens
  source 1..72: mol_type = genomic RNA
gggaggtgtgatatcgtggttcctgggaggtgtgatatcgtggttcctgggaggtgtgatattgtggttcct

SEQ ID NO: 1757 - RNA, 74 nt, Homo sapiens
  source 1..74: mol_type = genomic RNA
tgggaggtgtgatctcacactcgctgggaggtgtgctatcgtcttccccgggaggtgtgatcctgttcttcctg

SEQ ID NO: 1758 - RNA, 80 nt, Homo sapiens
  source 1..80: mol_type = genomic RNA
actgggaggtgtgatctcacactcgctgggaggtgtgctatcgtcttccctgggaggtgtgatcctgttcttcctgagcg

SEQ ID NO: 1759 - RNA, 72 nt, Homo sapiens
  source 1..72: mol_type = genomic RNA
gggaggtgtgatatcatggttcctgggaggtatgatatcgtggttcctgggaggtgtgatcccgtgctccct

SEQ ID NO: 1760 - RNA, 66 nt, Homo sapiens
  source 1..66: mol_type = genomic RNA
aggtgtgatatcgtgcttcctgggacgtgtgatgctgtgcttcctgggaggtgtgatcccacactc

SEQ ID NO: 1761 - RNA, 75 nt, Homo sapiens
  source 1..75: mol_type = genomic RNA
cccatctccacctggacccagcgtagacaaagaggtgtttctactccatatctacctggacccagtgtagatggg

SEQ ID NO: 1762 - RNA, 90 nt, Homo sapiens
  source 1..90: mol_type = genomic RNA
ttgaggcactgggtagtggatgatggagactcggtacccactgctgagggtggggaccaagtctgcgtcatcctctcctcagtgcctcaa

SEQ ID NO: 1763 - RNA, 69 nt, Homo sapiens
  source 1..69: mol_type = genomic RNA
ccattcctgctggtcaggagtggatactggagcaatagatacagttccacactgacactgcagaagtgg

SEQ ID NO: 1764 - RNA, 45 nt, Homo sapiens
  source 1..45: mol_type = genomic RNA
ggtatccgtttggggatggtttcactatccccagatggataccaa

SEQ ID NO: 1765 - RNA, 65 nt, Homo sapiens
  source 1..65: mol_type = genomic RNA
gaaggcagcagtgctcccctgtgacgtgctccatcaccgggcagggaagacaccgctgccacctc

SEQ ID NO: 1766 - RNA, 151 nt, Homo sapiens
  source 1..151: mol_type = genomic RNA
gggttggaaagctgtaggtgtggaggggcatggatacgggggccatgagggtggggtccaggctggaccaggcctgccctgagtcccccagcaggtgctccaggctggctcacaccctctgcctctctctcttccttcctggccccaaccc

SEQ ID NO: 1767 - RNA, 126 nt, Homo sapiens
  source 1..126: mol_type = genomic RNA
gcctgagcaatgtaggtagactgtttctaaaaaaataaaaagttaaaaaaatttatgttaacgtgtaatgtgtttactaatttttttttttttttttggagacagagtctccctctgtcgccaggc

SEQ ID NO: 1768 - RNA, 119 nt, Homo sapiens
  source 1..119: mol_type = genomic RNA
ggtatgctgttgcgctgtccttcctctggggagcaggctccgggggacagggaaaagcacacaaggaacttgtcctctagggcctgcagtctcatgggagagtgacatgcaccaggacc

SEQ ID NO: 1769 - RNA, 111 nt, Homo sapiens
  source 1..111: mol_type = genomic RNA
cttttgctgtcagtttttctgttgcttgtcttggttttatgccttttatatcaaggcacataaaaggcataaaaccaagacaagcaacaaaaaaaggattgatcacagaag

SEQ ID NO: 1770 - RNA, 82 nt, Homo sapiens
  source 1..82: mol_type = genomic RNA
tttttttgttgcttgtcttggttttatgccttttatgtgccttgatataaaaggcataaaaccaagacaagcaacagaaaaa

SEQ ID NO: 1771 - RNA, 109 nt, Homo sapiens
  source 1..109: mol_type = genomic RNA
gggtgaggatgtgtgtggatcctggaggaggcagagaagacagtgagcttgccagttctggtttccaacacttcctttcctgcgcttctcgattcccagatctgcaccc

SEQ ID NO: 1772 - RNA, 105 nt, Homo sapiens
  source 1..105: mol_type = genomic RNA
agagaggaatgaacagttaaattataacatgtccatattatgggttagttgtggacacatactaacgcataatatggacatgttataatttaactgttcctttct

SEQ ID NO: 1773 - RNA, 102 nt, Homo sapiens
  source 1..102: mol_type = genomic RNA
ttgtttataataaactgaaatatttgggactgatcttgatgtctgccaaaaccttggcagacatcaagatcagtcccaaatatttcagtttattatagacag

SEQ ID NO: 1774 - RNA, 100 nt, Homo sapiens
  source 1..100: mol_type = genomic RNA
tgtctataataaactgaaatatttgggactgatcttgatgtctgccaaggttttggcagacatcaagatcagtcccaaatatttcagtttattataaaca

SEQ ID NO: 1775 - RNA, 99 nt, Homo sapiens
  source 1..99: mol_type = genomic RNA
tggacttcagatttaacttctcattttctggttccttctaatgagtatgcttaacttggtagaaggaaccagaaaatgagaagttgagtaggaactcta

SEQ ID NO: 1776 - RNA, 95 nt, Homo sapiens
  source 1..95: mol_type = genomic RNA
gagttcctactcaacttctcattttctggttccttctaccaagttaagcatactcattagaaggaaccagaaaatgagaagttaaatctgaagtc

SEQ ID NO: 1777 - RNA, 97 nt, Homo sapiens
  source 1..97: mol_type = genomic RNA
caagttggcactgtagaatattgaggaaaagatggtcttattgcaaagattttcaataagaccatcctttcctcaatattctgtggtgtcatctttg

SEQ ID NO: 1778 - RNA, 94 nt, Homo sapiens
  source 1..94: mol_type = genomic RNA
atcccagagaagaaggaagaagaggaagaaatggctggttctcaggtgaatgtgtctgggttcaggggatgtgtctcctcttttcttctgggat

SEQ ID NO: 1779 - RNA, 93 nt, Homo sapiens
  source 1..93: mol_type = genomic RNA
ggcgcttttgtgcgcgcccgggtctgttggtgctcagagtgtggtcaggcggctcggactgagcaggtgggtgcggggctcggaggaggcggc

SEQ ID NO: 1780 - RNA, 93 nt, Homo sapiens
  source 1..93: mol_type = genomic RNA
aggcggttaagccatgggacagggccgcagatggagactgctcaaggtcaaaggggtctccagctgggaccctgcacctggttcgtagcccct

SEQ ID NO: 1781 - RNA, 89 nt, Homo sapiens
  source 1..89: mol_type = genomic RNA
cctgagcaccatttactgagtcctttgttctctactagtttgtagtagttcgtagcagagaacaaaggactcagtaaatggtgctcagg

SEQ ID NO: 1782 - RNA, 86 nt, Homo sapiens
  source 1..86: mol_type = genomic RNA
actgagtgagggagtcagagagttaagagaattagtacaggtgagattgtactgattatcttaactctctgaccccctcactcagt

SEQ ID NO: 1783 - RNA, 85 nt, Homo sapiens
  source 1..85: mol_type = genomic RNA
cctagcccagtacaaggcatatggtactcaagagacttagaaatccctaagtctctgagtaccatatgccttgtactgggctagg

SEQ ID NO: 1784 - RNA, 84 nt, Homo sapiens
  source 1..84: mol_type = genomic RNA
ggaagagtcaagtcaaggccagaggtcccacagcagggctggaaagcacacctgtgggacttctggccttgacttgactctttc

SEQ ID NO: 1785 - RNA, 83 nt, Homo sapiens
  source 1..83: mol_type = genomic RNA
ggtagagtgagctctaatccaatattactagcttctttataagaagaggaaactagtaatgttggattagggctcactctact

SEQ ID NO: 1786 - RNA, 81 nt, Homo sapiens
  source 1..81: mol_type = genomic RNA
taaatgaaaaagtagtagtcaaatatgcagatctatgtcatatatacagatatgtatatgtgactgctacttttttgttta

SEQ ID NO: 1787 - RNA, 77 nt, Homo sapiens
  source 1..77: mol_type = genomic RNA
gtgggaatagcaagagaactgaaagtggagcctgtcacatctccagactccagttttagttctcttgctatttccac

SEQ ID NO: 1788 - RNA, 73 nt, Homo sapiens
  source 1..73: mol_type = genomic RNA
aaaatggagctggccaaaaagcaggcagagactttaaaagcgtctctgcctgctttttggccagctccgtttt

SEQ ID NO: 1789 - RNA, 63 nt, Homo sapiens
  source 1..63: mol_type = genomic RNA
ggagctggccaaaaagcaggcagagacgcttttaaagtctctgcctgctttttggccagctcc

SEQ ID NO: 1790 - RNA, 71 nt, Homo sapiens
  source 1..71: mol_type = genomic RNA
tgccaatgcctatcacatatctgcctgtcctatgacaaacatggcaggtagatatttgataggcattggca

SEQ ID NO: 1791 - RNA, 58 nt, Homo sapiens
  source 1..58: mol_type = genomic RNA
gctgaagctctaaggttccgcctgcgggcaggaagcggaggaaccttggagcttcggc

SEQ ID NO: 1792 - RNA, 55 nt, Homo sapiens
  source 1..55: mol_type = genomic RNA
agtggctcacaccagtaatcccagcactttgggaggctgatgtgagtagaccact

SEQ ID NO: 1793 - RNA, 107 nt, Homo sapiens
  source 1..107: mol_type = genomic RNA
cacagcccttcctgtccccagttttcaggtgtggaaactgaggcaggaggcagtgaagtaacttgctcaggttgcacagctgggaagtggagcagggatttgaatcc

SEQ ID NO: 1794 - RNA, 104 nt, Homo sapiens
  source 1..104: mol_type = genomic RNA
ggatgtgttcctgtcccagaaggagctgatggttgtatctatgaaggtaagcatttttgtagatacgagcaccagccaccctaagcaaaggcagagaatgctta

SEQ ID NO: 1795 - RNA, 110 nt, Homo sapiens
  source 1..110: mol_type = genomic RNA
atgattcagagcatctgtccagtgtctgctgtagatccctcaaatccgtgtttggacgcttctggtaaggggtgtatggcagatgcacccgacagatgcacttggcagca

SEQ ID NO: 1796 - RNA, 106 nt, Homo sapiens
  source 1..106: mol_type = genomic RNA
agaagaatgcccaaccagccctcagttgctacagttccctgttgtttcagctcgacaacaacaggcggctgtagcaatggggggctggatgggcatctcaatgtgc

SEQ ID NO: 1797 - RNA, 103 nt, Homo sapiens
  source 1..103: mol_type = genomic RNA
aggaatttttaacccgatcactagattatctacaagggaatttttttttaatttaaaaaattcccttgtagataacccggtggtcaggttggatggctccatg

SEQ ID NO: 1798 - RNA, 106 nt, Homo sapiens
  source 1..106: mol_type = genomic RNA
ctggcttccaaaggcctctgtgtgttcctgtatgtgggcgtgcacgtacctgtcacatgtgtacgcgcagaccacaggatgtccacactggcttccaaacacatct

SEQ ID NO: 1799 - RNA, 102 nt, Homo sapiens
  source 1..102: mol_type = genomic RNA
gcttatcgaggaaaagatcgaggtgggttggggcgggctctggggatttggtctcacagcccggatcccagcccacttaccttggttactctccttccttct

SEQ ID NO: 1800 - RNA, 103 nt, Homo sapiens
  source 1..103: mol_type = genomic RNA
gagtcagaattctcatcaggctgtgatgctcagttgtgtgtagattgaaagccctaattttacacacaactgaggatcatagcctgatggttcctttttgttt

SEQ ID NO: 1801 - RNA, 109 nt, Homo sapiens
  source 1..109: mol_type = genomic RNA
tcttcagtatgacacctcaaagaagcaatactgttacctgaaataggctgcgaagataacagtatttcagataacagtattacatctttgaagtgtcatattcactgac

SEQ ID NO: 1802 - RNA, 100 nt, Homo sapiens
  source 1..100: mol_type = genomic RNA
cacacagacggcagctgcggcctagcccccaggcttcacttggcgtggacaacttgctaagtaaagtggggggtgggccacggctggctcctacctggac

SEQ ID NO: 1803 - RNA, 108 nt, Homo sapiens
  source 1..108: mol_type = genomic RNA
tccacccagcaggcgcaggtcctgtgcagcaggccaaccgagaagcgcctgcgtctcccattttcgggctggcctgctgctccggacctgtgcctgatcttaatgctg

SEQ ID NO: 1804 - RNA, 98 nt, Homo sapiens
  source 1..98: mol_type = genomic RNA
gatgttgatgcacgtgacggggagggcataggagagggttgatataaaatgcaattacagcctcttatgctttccaaagtgggggatgattcaatgat

SEQ ID NO: 1805 - RNA, 91 nt, Homo sapiens
  source 1..91: mol_type = genomic RNA
ggcgccccggctccccgcgcccccgatcggggccgccgctagtagtggcggcggcggaggcgggggcagcggcggcggcggcggaggcgcc

SEQ ID NO: 1806 - RNA, 87 nt, Homo sapiens
  source 1..87: mol_type = genomic RNA
gcccatttgccttggcttggggtggcagtcctgtgggaatgagagatgccaaactggacctgccagccccgttccagggcacagcat

SEQ ID NO: 1807 - RNA, 107 nt, Homo sapiens
  source 1..107: mol_type = genomic RNA
gcccagggtagctctctgtattgcttgttacattttaggattgcttgccccttgctccaatggtgcaggcagaagaaatgcaaacaaagtacagcattagccttagc

SEQ ID NO: 1808 - RNA, 96 nt, Homo sapiens
  source 1..96: mol_type = genomic RNA
gttcagggaaaaggtcattgtaaggttaatgcacccatattttaatatcaaactatgacaaatttgactacagcctttccgtacccctgccaaaac

SEQ ID NO: 1809 - RNA, 70 nt, Homo sapiens
  source 1..70: mol_type = genomic RNA
catgtaggtgagtgattgctatttcaaaagactagaggtaggaaatgaggctaatgcactacttcacatg

SEQ ID NO: 1810 - RNA, 139 nt, Homo sapiens
  source 1..139: mol_type = genomic RNA
tgagggatatagagagcaggaagattaatgtcatattggagttggactgcagggcttcctttacacaataaatattgtatgaagtgctgatgtaacctttactgcagcatgacatgggatttggctgtttttatggctc

SEQ ID NO: 1811 - RNA, 70 nt, Homo sapiens
  source 1..70: mol_type = genomic RNA
ttgtgcttcatcgtaattaaccttaagtggttcgggtaaatcactttaatttgttatgtgttggcagaat

SEQ ID NO: 1812 - RNA, 101 nt, Homo sapiens
  source 1..101: mol_type = genomic RNA
tcagtggaaagcatgcatccagggtgtggagccaaaattagaagggccaaaattctacctggcccactaccacagcaaccttgggcatcgttttcttttga

SEQ ID NO: 1813 - RNA, 61 nt, Homo sapiens
  source 1..61: mol_type = genomic RNA
cacgtcctccagcttttttccttagtggccaattcctgagaaaagggccaacgtgcttcca

SEQ ID NO: 1814 - RNA, 63 nt, Homo sapiens
  source 1..63: mol_type = genomic RNA
tggggggctggcagctcatcagtccaggccatctggccactgagtcagcaccagcgcccaatc

SEQ ID NO: 1815 - RNA, 68 nt, Homo sapiens
  source 1..68: mol_type = genomic RNA
ccagccatcgcccttgaggggccctaggacttacttgtgcagggcatgtccagggggtccaggtctgc

SEQ ID NO: 1816 - RNA, 76 nt, Homo sapiens
  source 1..76: mol_type = genomic RNA
cttgggaggagggtggggtggctcctctgcagtgagtaggtctgcctggagctactccaccatctcccccagcccc

SEQ ID NO: 1817 - RNA, 72 nt, Homo sapiens
  source 1..72: mol_type = genomic RNA
gagcatccttcagtgttcagagatggagtcagtattggtctggccatttttagggcaaagaggcagcatcat

SEQ ID NO: 1818 - RNA, 64 nt, Homo sapiens
  source 1..64: mol_type = genomic RNA
tgttccatttatctgacctgatgaaggtctcctggcattgattaggtctgatgatccatttctg

SEQ ID NO: 1819 - RNA, 86 nt, Homo sapiens
  source 1..86: mol_type = genomic RNA
ggcttagaaacagtccctaggtaggatttggggaggagctaagaagcccctacagggcccagaggtggggactgagccttagttgg

SEQ ID NO: 1820 - RNA, 91 nt, Homo sapiens
  source 1..91: mol_type = genomic RNA
acgccccccgccccgccaccgccttggaggctgacctcttactttcggtcggtcttcttccctgggcttggtttgggggcgggggagtgtc

SEQ ID NO: 1821 - RNA, 101 nt, Homo sapiens
  source 1..101: mol_type = genomic RNA
gatgggccccttgtgtcctgaattgggtgggggctctgagtggggaaagtgggggcctaggggaggtcacagttgggtctaggggtcaggagggcccagga

SEQ ID NO: 1822 - RNA, 67 nt, Homo sapiens
  source 1..67: mol_type = genomic RNA
aacaaggtgacttggggcatggagtcccacttcctggagcccacaccccagcttgtcacacaccaac

SEQ ID NO: 1823 - RNA, 58 nt, Homo sapiens
  source 1..58: mol_type = genomic RNA
ggtggaagtgggttcctcccagttcctgagacaggaaacagggacccaggagaccagc

SEQ ID NO: 1824 - RNA, 54 nt, Homo sapiens
  source 1..54: mol_type = genomic RNA
gaaagctgcaggtgctgatgttggggggacattcagactacctgcagcagagcc

SEQ ID NO: 1825 - RNA, 83 nt, Homo sapiens
  source 1..83: mol_type = genomic RNA
atagtgctcttcagggttttacttgggagattggagtggccagtgttcctaaacaattctaagtgccttggcccacaacatac

SEQ ID NO: 1826 - RNA, 66 nt, Homo sapiens
  source 1..66: mol_type = genomic RNA
aaagctggatactcagtcatggtcattgtaacatgatagtgacaggtactgggtaagactgcatag

SEQ ID NO: 1827 - RNA, 99 nt, Homo sapiens
  source 1..99: mol_type = genomic RNA
tgcagtgggttggagcttcagcctacacctgtaaagaattggtcagcctggggactggtgatctctgcagctgtgggctcagctctgggctgggcctgg

SEQ ID NO: 1828 - RNA, 55 nt, Homo sapiens
  source 1..55: mol_type = genomic RNA
ccactgctggccggggcccctactcaaggctaggaggccttggccaaggacagtc

SEQ ID NO: 1829 - RNA, 82 nt, Homo sapiens
  source 1..82: mol_type = genomic RNA
ctcagcaggctccagctcggtggcactgggggaaggctccagaccccagcctctgtcatccctgcatggagcccacatctcc

SEQ ID NO: 1830 - RNA, 64 nt, Homo sapiens
  source 1..64: mol_type = genomic RNA
atgcacatcaggttctagaggttttgccctagcggctcctcctctcaggatgtgatgtcacctg

SEQ ID NO: 1831 - RNA, 84 nt, Homo sapiens
  source 1..84: mol_type = genomic RNA
acagcgccctgcaggcacagacagccctggcttctgcctctttctttgtggaagccactctgtcaggcctgggatggaggggca

SEQ ID NO: 1832 - RNA, 70 nt, Homo sapiens
  source 1..70: mol_type = genomic RNA
acaaatagcttcagggagtcaggggagggcagaaatagatggccttcccctgctgggaagaaagtgggtc

SEQ ID NO: 1833 - RNA, 67 nt, Homo sapiens
  source 1..67: mol_type = genomic RNA
aaatctctctccatatctttcctgcagcccccaggtgggggggaagaaaaggtggggaattagattc

SEQ ID NO: 1834 - RNA, 64 nt, Homo sapiens
  source 1..64: mol_type = genomic RNA
ttttctgcacaaattaatcagttaatgcatagaaagcattcaactagtgattgtgttataagag

SEQ ID NO: 1835 - RNA, 84 nt, Homo sapiens
  source 1..84: mol_type = genomic RNA
tcccctgtgtgtgttctctgatggacagtaagccttgacttatggctaaatgcttcttcacaatggtcacatgcatagggcttt

SEQ ID NO: 1836 - RNA, 91 nt, Homo sapiens
  source 1..91: mol_type = genomic RNA
ggggcatttagggtaactgagctgctgccggggcctggcgctcctctaccttgtcaggtgacccagcagtccctccccctgcatggtgccc

SEQ ID NO: 1837 - RNA, 87 nt, Homo sapiens
  source 1..87: mol_type = genomic RNA
acatttttgtccaattaccacttctttttgccacctgagcacagtcagcagtcagcataaaaaagtgataatgggaagttaatgtct

SEQ ID NO: 1838 - RNA, 70 nt, Homo sapiens
  source 1..70: mol_type = genomic RNA
cacagtctgactcagtgactcatgtgctggcagtggccacgtaaatagagctactgtgtctgaaagcaat

SEQ ID NO: 1839 - RNA, 84 nt, Homo sapiens
  source 1..84: mol_type = genomic RNA
ctgggtcgaggcagttctgagcacagtacactgggctgcccccactgcccagtgccctgctcagctcaagtccttgtgcccctc

SEQ ID NO: 1840 - RNA, 69 nt, Homo sapiens
  source 1..69: mol_type = genomic RNA
atctaacaccaggagaatcccatagaacattgacatcaacactagggggtttgcccttgtggggaagaa

SEQ ID NO: 1841 - RNA, 58 nt, Homo sapiens
  source 1..58: mol_type = genomic RNA
tgctctgtggagctgaggagcagattctctctctctcctcccggcttcacctcctgag

SEQ ID NO: 1842 - RNA, 76 nt, Homo sapiens
  source 1..76: mol_type = genomic RNA
aatcagggtggagtgtagttctgagcagagccttaaaggatgaggtatgttcaagactgaatgacacctttgtgat

SEQ ID NO: 1843 - RNA, 62 nt, Homo sapiens
  source 1..62: mol_type = genomic RNA
gctgggggtcccccgacagtgtggagctggggccgggtcccggggaggggggttctgggcag

SEQ ID NO: 1844 - RNA, 67 nt, Homo sapiens
  source 1..67: mol_type = genomic RNA
ggtgaagttccaggggaagattttagtatgccacatttctaaaatttgcatccaggaacatcatcct

SEQ ID NO: 1845 - RNA, 80 nt, Homo sapiens
  source 1..80: mol_type = genomic RNA
actctgatcctggggctcagcgagtttgcaaggggtgtttctgtccatggtcaggcttgccagccttggtccttgggccc

SEQ ID NO: 1846 - RNA, 80 nt, Homo sapiens; identical to SEQ ID NO: 1845
  source 1..80: mol_type = genomic RNA

SEQ ID NO: 1847 - RNA, 81 nt, Homo sapiens
  source 1..81: mol_type = genomic RNA
gttctgtgaggggctcacatcaccccatcaaagtggggactcatggggagagggggtagttaggagctttgatagaggcgg

SEQ ID NO: 1848 - RNA, 85 nt, Homo sapiens
  source 1..85: mol_type = genomic RNA
attagctggggcggcgagtccgactcatcaatattttaaggaatgacccggccttggggtgcggaattgctgcgcgggcgggggc

SEQ ID NO: 1849 - RNA, 93 nt, Homo sapiens
  source 1..93: mol_type = genomic RNA
tacttatggcaccccactcctggtaccatagtcataagttaggagatgttagagctgtgagtaccatgacttaagtgtggtggcttaaacatg

SEQ ID NO: 1850 - RNA, 78 nt, Homo sapiens
  source 1..78: mol_type = genomic RNA
tagttctttttctcccttgagggcacttttcagttcctgagatcaatgtggtccctactggggagaccataggagccc

SEQ ID NO: 1851 - RNA, 67 nt, Homo sapiens
  source 1..67: mol_type = genomic RNA
atggaggtggagagtcatcagcagcactgagcaggcagtgttgtctgctgagtttccacgtcatttg

SEQ ID NO: 1852 - RNA, 70 nt, Homo sapiens
  source 1..70: mol_type = genomic RNA
ccttgggagggcattgtgcagggctatcaggcagtttcctgggccctgtctgcagagcctaaacagatca

SEQ ID NO: 1853 - RNA, 95 nt, Homo sapiens
  source 1..95: mol_type = genomic RNA
gccaccaagaaggtgaagggagggtcagtcccaatctgaatcccaccaaaataggtggtagagggttgccctcctttcttccctcacctctgacc

SEQ ID NO: 1854 - RNA, 65 nt, Homo sapiens
  source 1..65: mol_type = genomic RNA
cgccgggggcttcagcaggaacagctgggtggaggcagagctgttctgctgtggctgcagccctg

SEQ ID NO: 1855 - RNA, 67 nt, Homo sapiens
  source 1..67: mol_type = genomic RNA
gagacaccagaaggccacctgcttaggaggccagaggtgcccctgggccggccttggtgaggggccc

SEQ ID NO: 1856 - RNA, 78 nt, Homo sapiens
  source 1..78: mol_type = genomic RNA
agagacacctgttccttgggaagctggtgacattgctaattcatttcacaccagcctgacaggaacagcctgactgaa

SEQ ID NO: 1857 - RNA, 76 nt, Homo sapiens
  source 1..76: mol_type = genomic RNA
ccgatgcctcgggagtctacagcagggccatgtctgtgagggcccaagggtgcatgtgtctcccaggtttcggtgc

SEQ ID NO: 1858 - RNA, 85 nt, Homo sapiens
  source 1..85: mol_type = genomic RNA
ctttgtggaacagtgcaatgttttccttgcctgtggcaagaccacttcggttcaaggctaagaaactagactgttcctacagaga

SEQ ID NO: 1859 - RNA, 88 nt, Homo sapiens
  source 1..88: mol_type = genomic RNA
ttgggctttgatgtgggctcaggctcagagggctgaagtggttgtggggaggggcttctggggactgtgtccatgtctctgtcgtttt

SEQ ID NO: 1860 - RNA, 76 nt, Homo sapiens
  source 1..76: mol_type = genomic RNA
agcacgcacgtgccttcctgtctgtgcctgccttcgaagtgcacggcagggccaggacgggtcgctgtgggtgggg

SEQ ID NO: 1861 - RNA, 73 nt, Homo sapiens
  source 1..73: mol_type = genomic RNA
ggggaggtacctgggacaggaggaggaggcagccttgcctcagaaaccaaactgtcaaaagtgtaggttccac

SEQ ID NO: 1862 - RNA, 72 nt, Homo sapiens
  source 1..72: mol_type = genomic RNA
gggttctgaccaatcatgttacagtgttttctcctttagagagagctggtgacatgagaggcagaaaaagga

SEQ ID NO: 1863 - RNA, 96 nt, Homo sapiens
  source 1..96: mol_type = genomic RNA
tgagtttagaagagggccagctaaatcagcagagacatgaggtgatcaaaaaccttttttcaaagcagtgggagctggactacttctgaaccaata

SEQ ID NO: 1864 - RNA, 66 nt, Homo sapiens
  source 1..66: mol_type = genomic RNA
accagccacctcccactacttcacttgtgaacattgcattcgtggagggtggcaggtgcagctctg

SEQ ID NO: 1865 - RNA, 60 nt, Homo sapiens
  source 1..60: mol_type = genomic RNA
tcaggagggaccagtgtggctcagcgaggtggctgagtttacttaaggtattggaatgag

SEQ ID NO: 1866 - RNA, 66 nt, Homo sapiens
  source 1..66: mol_type = genomic RNA
agaaaatagcttctgagctgaggacagcttgctctgcttttctttagcttaggagctaaccatggt

SEQ ID NO: 1867 - RNA, 62 nt, Homo sapiens
  source 1..62: mol_type = genomic RNA
agagaagtggccggcatgtccagggcatccccattgctctgtgactgctgccatccttctcc

SEQ ID NO: 1868 - RNA, 102 nt, Homo sapiens
  source 1..102: mol_type = genomic RNA
ctgccttagacctagacacctccagttctgggttcttagaggcctaatcctctacaaactcagttttcagactgtgagggaaattctctgtcttattgcttt

SEQ ID NO: 1869 - RNA, 91 nt, Homo sapiens
  source 1..91: mol_type = genomic RNA
aagctgcttagtgtccttagagtctccagaggcatccctaacccagaatcttttgactgtcctctggagagaaaggcagtaggtctgtacc

SEQ ID NO: 1870 - RNA, 84 nt, Homo sapiens
  source 1..84: mol_type = genomic RNA
tcagaagaaaaaacaggagataaagtttgtgataatgtttgtctatatagttatgaatgttttttcctgtttccttcagggcca

SEQ ID NO: 1871 - RNA, 81 nt, Homo sapiens
  source 1..81: mol_type = genomic RNA
tatgggttcagagggaactccattggacagaaatttccttttgaggaaatctttccctggagtttcttcttacctttttcc

SEQ ID NO: 1872 - RNA, 83 nt, Homo sapiens
  source 1..83: mol_type = genomic RNA
tctgggggttctggagtctaggattccaggatctgggttttgaggtcttgggttgtagggtctgcggtttgaagcccctcttg

SEQ ID NO: 1873 - RNA, 57 nt, Homo sapiens
  source 1..57: mol_type = genomic RNA
tggcgtctggggcctgaggctgcagaacattgcagcattcatgtcccacccccacca

SEQ ID NO: 1874 - RNA, 100 nt, Homo sapiens
  source 1..100: mol_type = genomic RNA
tcagagaggggaaagagagctgagtgtgacctggagcagctcaggagggcttcctgggtgaggtggcaggttacaggttcgatctttggccctcagattc

SEQ ID NO: 1875 - RNA, 76 nt, Homo sapiens
  source 1..76: mol_type = genomic RNA
gaaaggttgggggcacagagagcaaggagccttccccagaggagtcaggccttgttcctgtccccattcctcagag

SEQ ID NO: 1876 - RNA, 101 nt, Homo sapiens
  source 1..101: mol_type = genomic RNA
gatcaggcccagccccctggccccaaaccctgcagccccagctggaggatgaggagatgctgggcttgggtgggggaatcaggggtgtaaaggggcctgct

SEQ ID NO: 1877 - RNA, 92 nt, Homo sapiens
  source 1..92: mol_type = genomic RNA
ggccattcctctctgggaaatgggacaggtagtggccacagtgagaaagctggcctgtccttctgccccagggcccagagtctgtgactgga

SEQ ID NO: 1878 - RNA, 73 nt, Homo sapiens
  source 1..73: mol_type = genomic RNA
tgggctttgcccgctttctgagctggaccctctctctacctctggtgcagaactacagcggaaggaatctctg

SEQ ID NO: 1879 - RNA, 73 nt, Homo sapiens; identical to SEQ ID NO: 1878
  source 1..73: mol_type = genomic RNA

SEQ ID NO: 1880 - RNA, 71 nt, Homo sapiens
  source 1..71: mol_type = genomic RNA
agtggcccagggtgaggctagctggtgtggtcacccactctccagcccagccccaatcccaccacaaccac

SEQ ID NO: 1881 - RNA, 65 nt, Homo sapiens
  source 1..65: mol_type = genomic RNA
aaaaggcgagacattgccagggagtttattttgtagctctcttgataaaatgttttagcaaacac

SEQ ID NO: 1882 - RNA, 81 nt, Homo sapiens
  source 1..81: mol_type = genomic RNA
gcttcttaattatgtcataaacccactgtggacaagggccttgtcttagacagtcactgtgggtacatgctaggtgctcaa

SEQ ID NO: 1883 - RNA, 85 nt, Homo sapiens
  source 1..85: mol_type = genomic RNA
ttggcttgagtccctgagcaaagccactgggaatgctccctgaggacgttatatgagtgctcagctcatggggctatgatggtca

SEQ ID NO: 1884 - RNA, 65 nt, Homo sapiens
  source 1..65: mol_type = genomic RNA
gacatgtggggtttgctgtagacatttcagataactcgggattctgtagcttcctggcaactttg

SEQ ID NO: 1885 - RNA, 80 nt, Homo sapiens
  source 1..80: mol_type = genomic RNA
ctggtctccgcagagcctctgcccctcccgagacacccgctacctggtgttagcggtggaccgccctgcgggggcctggc

SEQ ID NO: 1886 - RNA, 73 nt, Homo sapiens
  source 1..73: mol_type = genomic RNA
accgcgagttccgcgcctggccgtgtcgccccacgagggggactgtgggctcagcgcgtggggcccggagcat

SEQ ID NO: 1887 - RNA, 69 nt, Homo sapiens
  source 1..69: mol_type = genomic RNA
cggggcccaggcgggcatgtggggtgtctggagacgccaggcagccccacagcctcagacctcgggcac

SEQ ID NO: 1888 - RNA, 72 nt, Homo sapiens
  source 1..72: mol_type = genomic RNA
cggcccctttgttaagggtctcagctccagggaactttaaaaccctgagaccctaaccttaaaggtgctgca

SEQ ID NO: 1889 - RNA, 90 nt, Homo sapiens
  source 1..90: mol_type = genomic RNA
ggggaagatgttgcacttgtctcagtgagagatgcttctagatccaggaggcagacctcaaggatggagagaaggcagatcctttgagat

SEQ ID NO: 1890 - RNA, 59 nt, Homo sapiens
  source 1..59: mol_type = genomic RNA
gctgctctgctgttcctctgtctcccagactctgggtggatggagcaggtcgggggcca

SEQ ID NO: 1891 - RNA, 85 nt, Homo sapiens
  source 1..85: mol_type = genomic RNA
ggcctgggtaggcttgcatgggggactgggaagagaccatgaacaggttagtccagggagttctcatcaagcctttactcagtag

SEQ ID NO: 1892 - RNA, 56 nt, Homo sapiens
  source 1..56: mol_type = genomic RNA
aacagttgagtcctgagaaccattgagaaccagttttcccaggattaactgttccg

SEQ ID NO: 1893 - RNA, 71 nt, Homo sapiens
  source 1..71: mol_type = genomic RNA
tagagaggaaggtgtaccagggttttggagtttttttttcctcctgagaccctagttccacattctggagc

SEQ ID NO: 1894 - RNA, 105 nt, Homo sapiens
  source 1..105: mol_type = genomic RNA
aattgtcagcaggcaattatctgaggatgcaggagaggaagggggcttctttttgacgcctacttcatcagctgctcctcagatcagagccttgcaggtcaggcc

SEQ ID NO: 1895 - RNA, 73 nt, Homo sapiens
  source 1..73: mol_type = genomic RNA
gaaaacaaccaggtgggcttcccggagggcggaacacccagccccagcatccagggctcacctaccacgtttg

SEQ ID NO: 1896 - RNA, 62 nt, Homo sapiens
  source 1..62: mol_type = genomic RNA
tggtttttgctctgagtgaccgtggtggttgtgggagtcactgcaggactcagcaggaattc

SEQ ID NO: 1897 - RNA, 77 nt, Homo sapiens
  source 1..77: mol_type = genomic RNA
tggtggtgtgtgcctgtagtcttagctactcgggaggctgagggaggagactgcagtgagtggaggtcacgccactg

SEQ ID NO: 1898 - RNA, 68 nt, Homo sapiens
  source 1..68: mol_type = genomic RNA
ctcaggctcagtggtgcatgcttatagtcccagccactctggaggctgaaggaagatggcttgagcct

SEQ ID NO: 1899 - RNA, 77 nt, Homo sapiens
  source 1..77: mol_type = genomic RNA
ctcttggtatgaacatctgtgtgttcatgtctctctgtgcacaggggacgagagtcactgatgtctgtagctgagac

SEQ ID NO: 1900 - RNA, 69 nt, Homo sapiens
  source 1..69: mol_type = genomic RNA
ctgggtctcctttctgctgagagttgaacacttgttgggacaacctgtctgtggaaaggagctacctac

SEQ ID NO: 1901 - RNA, 83 nt, Homo sapiens
  source 1..83: mol_type = genomic RNA
agttcttctgcagacaaaagcatcaggaagtacccaccatgtaccagtgggcccttcttgatgctcttgattgcagaggagcc

SEQ ID NO: 1902 - RNA, 80 nt, Homo sapiens
  source 1..80: mol_type = genomic RNA
atcatgtactgcagttgcctttttgttcccatgctgtttaagcctagcataggcaccaaaaagcaacaacagtatgtgaa

SEQ ID NO: 1903 - RNA, 86 nt, Homo sapiens
  source 1..86: mol_type = genomic RNA
cttacatcacacacagagttaactcaaaatggactaatttttccactagttagtccatttcaagttaactctgtgtgtgatgtagt

SEQ ID NO: 1904 - RNA, 84 nt, Homo sapiens
  source 1..84: mol_type = genomic RNA
gtgctttacatgaatggtcccattgaatcccaacagctttgcgaagtgttgttgggattcagcaggaccattcgtgtaaagtaa

SEQ ID NO: 1905 - RNA, 63 nt, Homo sapiens
  source 1..63: mol_type = genomic RNA
agttggaagatggacgtactttgtctgactacaatattcaaaaggagtctactcttcatcttg

SEQ ID NO: 1906 - RNA, 68 nt, Homo sapiens
  source 1..68: mol_type = genomic RNA
gaagcctcttggggcttatttagacaatggtttcatcatttcgtctgaatagagtctgaagagtcttt

SEQ ID NO: 1907 - RNA, 73 nt, Homo sapiens
  source 1..73: mol_type = genomic RNA
ttggcaggtgccatgttgcctgctccttactgtacacgtggctggcaaggagacgggaacatggagccgccat

SEQ ID NO: 1908 - RNA, 73 nt, Homo sapiens
  source 1..73: mol_type = genomic RNA
agggagaaaagctgggctgagaggcgactggtgtctaatttgtttgtctctccaactcagactgcctggccca

SEQ ID NO: 1909 - RNA, 49 nt, Homo sapiens
  source 1..49: mol_type = genomic RNA
gtgaggctggagtgagcggagatcgtaccactgcactccaacctggtga

SEQ ID NO: 1910 - RNA, 94 nt, Homo sapiens
  source 1..94: mol_type = genomic RNA
tggtttgcgactctgaaaactagaaggtttatgactgggcatttctcacccaatgcccaatattgaactttctagttgtcagagtcattaaccc

SEQ ID NO: 1911 - RNA, 84 nt, Homo sapiens
  source 1..84: mol_type = genomic RNA
gcatcttgcagagccgttccaatgcgacacctctagagtgtcatcccctagaatgtcaccttggaaagactctgcaagatgcct

SEQ ID NO: 1912 - RNA, 81 nt, Homo sapiens
  source 1..81: mol_type = genomic RNA
catcctccttacgtcccaccccccactcctgtttctggtgaaatattcaaacaggagtgggggtgggacataaggaggata

SEQ ID NO: 1913 - RNA, 53 nt, Homo sapiens
  source 1..53: mol_type = genomic RNA
tcactttaggagaagtaaagtagaactttggttttcaacttttcctacagtgt

SEQ ID NO: 1914 - RNA, 80 nt, Homo sapiens
  source 1..80: mol_type = genomic RNA
aggcagcaaatggccagagctcacacagagggatgagtgcacttcacctgcagtgtgactcagcaggccaacagatgcta

SEQ ID NO: 1915 - RNA, 74 nt, Homo sapiens
  source 1..74: mol_type = genomic RNA
gcaaatggccagagctcacacagagggatgagtgcacttcacctgcagtgtgactcagcaggccaacagatgct

SEQ ID NO: 1916 - RNA, 85 nt, Homo sapiens
  source 1..85: mol_type = genomic RNA
gcctcacttttccacttatgcctgccctgcccctcgaatctgctccacgatttgggcaggacaggcagaagtggataagtgagga

SEQ ID NO: 1917 - RNA, 91 nt, Homo sapiens
  source 1..91: mol_type = genomic RNA
gtgtcctcacttgtccacttctgcctgccctgcccaaatggtggagcagattcgaggggcagggcaggaagaagtggacaagtgaggccat

SEQ ID NO: 1918 - RNA, 91 nt, Homo sapiens; identical to SEQ ID NO: 1917
  source 1..91: mol_type = genomic RNA

SEQ ID NO: 1919 - RNA, 60 nt, Homo sapiens
  source 1..60: mol_type = genomic RNA
actttgtgcattgggtccacaaggaggggatgacccttgtgggctcagggtacaaaggtt

SEQ ID NO: 1920 - RNA, 93 nt, Homo sapiens
  source 1..93: mol_type = genomic RNA
taagtgtaaacttaaggactgtcttttctaagcctgtgccttgcctttcctttggcacaggcttagaaaagacagtctttaagtttacacttc

SEQ ID NO: 1921 - RNA, 80 nt, Homo sapiens
  source 1..80: mol_type = genomic RNA
ccagtgactgataccttggaggcattttatctaagatacacacaaagcaaatgcctctaaggtatcagtttaccaggcca

SEQ ID NO: 1922 - RNA, 98 nt, Homo sapiens
  source 1..98: mol_type = genomic RNA
ctctcaccaagcaagtgcagtggggcttgctggcttgcaccgtgactccctctcaccaagcaagtgtcgtggggcttgctggcttgcactgtgaagat

SEQ ID NO: 1923 - RNA, 100 nt, Homo sapiens
  source 1..100: mol_type = genomic RNA
cagagtctccttcgtgtacagggaggagactgtacgtgagagatagtcagatccgcatgttagagcagagtctccttcgtgtacagggaggagattgtac

SEQ ID NO: 1924 - RNA, 67 nt, Homo sapiens
  source 1..67: mol_type = genomic RNA
gcgccctccctctctccccggtgtgcaaatgtgtgtgtgcggtgttatgccggacaagagggaggtg

SEQ ID NO: 1925 - RNA, 53 nt, Homo sapiens
  source 1..53: mol_type = genomic RNA
ggtgggggttggaggcgtgggttttagaacctatccctttctagccctgagca

SEQ ID NO: 1926 - RNA, 74 nt, Homo sapiens
  source 1..74: mol_type = genomic RNA
gtgacgactggccccgcctcttcctctcggtcccatattgaactcgagttggaagaggcgagtccggtctcaaa

SEQ ID NO: 1927 - RNA, 74 nt, Homo sapiens; identical to SEQ ID NO: 1926
  source 1..74: mol_type = genomic RNA

SEQ ID NO: 1928 - RNA, 70 nt, Homo sapiens
  source 1..70: mol_type = genomic RNA
ttcctgcagattgtttcttttgccgtgcaagtttaagtttttgcacggcaaaagaaacaatccagagggt

SEQ ID NO: 1929 - RNA, 67 nt, Homo sapiens
  source 1..67: mol_type = genomic RNA
ctggtccatttccctgccattcccttggcttcaatttactcccagggctggcagtgacatgggtcaa

SEQ ID NO: 1930 - RNA, 91 nt, Homo sapiens
  source 1..91: mol_type = genomic RNA
gttctagagcatggtttctcatcatttgcactactgatacttggggtcagataattgtttgtggtgggggctgttgtttgcattgtaggat

SEQ ID NO: 1931 - RNA, 86 nt, Homo sapiens
  source 1..86: mol_type = genomic RNA
aggagtgaccaaaagacaagagtgcgagccttctattatgcccagacagggccaccagagggctccttggtctaggggtaatgcca

SEQ ID NO: 1932 - RNA, 66 nt, Homo sapiens
  source 1..66: mol_type = genomic RNA
agcagccctcggcggcccggggggcgggcggcggtgcccgtcccggggctgcgcgaggcacaggcg

SEQ ID NO: 1933 - RNA, 65 nt, Homo sapiens
  source 1..65: mol_type = genomic RNA
tgtctggggatttggagaagtggtgagcgcaggtctttggcaccatctcccctggtcccttggct

SEQ ID NO: 1934 - RNA, 66 nt, Homo sapiens
  source 1..66: mol_type = genomic RNA
tctgtacctcagctttgctcccaaccaaccacttccacatgttttgctggtagagctgaggacagc

SEQ ID NO: 1935 - RNA, 71 nt, Homo sapiens
  source 1..71: mol_type = genomic RNA
tggatcacttgaggccaagagtgcaaggctgtagtgtgcacagccttgaattcttggccttaagtgatccc

SEQ ID NO: 1936 - RNA, 89 nt, Homo sapiens
  source 1..89: mol_type = genomic RNA
tggagagcttggtctgtagcggtttccttcggggcaggtggggactgctcctttgggaggaaggaggaggcccaggccgcgtcttcagg

SEQ ID NO: 1937 - RNA, 55 nt, Homo sapiens
  source 1..55: mol_type = genomic RNA
ccggatccgagtcacggcaccaaatttcatgcgtgtccgtgtgaagagaccacca

SEQ ID NO: 1938 - RNA, 58 nt, Homo sapiens
  source 1..58: mol_type = genomic RNA
agaagggtgtgtgtgtttttcctgagaataagagaaggaaggacagccaaattcttca

SEQ ID NO: 1939 - RNA, 43 nt, Homo sapiens
  source 1..43: mol_type = genomic RNA
atgaacctggtggcttccttttctgggaggaagttagggttca

SEQ ID NO: 1940 - RNA, 68 nt, Homo sapiens
  source 1..68: mol_type = genomic RNA
ggagtactccagtcaataccgtgtgagttagaaaagctcaattcacaaggtattgactggcgtattca

SEQ ID NO: 1941 - RNA, 75 nt, Homo sapiens
  source 1..75: mol_type = genomic RNA
gagcgcacagaggtaggtgtggaagaaagtgaaacactattttaggttttagttacactctgctgtggtgtgctg

SEQ ID NO: 1942 - RNA, 66 nt, Homo sapiens
  source 1..66: mol_type = genomic RNA
acccaggaggcggaggaggtggaggttgcagtgagccaagatcgtggcactgactccagcctgggg

SEQ ID NO: 1943 - RNA, 86 nt, Homo sapiens
  source 1..86: mol_type = genomic RNA
gttttttgcccatagtggttgtgaatttaccttctcctctttgcagtgataaaggaggtaaattcacaaccactgtgggcagaaac

SEQ ID NO: 1944 - RNA, 74 nt, Homo sapiens
  source 1..74: mol_type = genomic RNA
gagtaggcttaggttatgtacgtagtctaggccatacgtgttggagattgagactagtagggctaggcctactg

SEQ ID NO: 1945 - RNA, 58 nt, Homo sapiens
  source 1..58: mol_type = genomic RNA
cttcccagctgccctaagtcaggagtggctttcctgacacggagggtggcttgggaaa

SEQ ID NO: 1946 - RNA, 67 nt, Homo sapiens
  source 1..67: mol_type = genomic RNA
aatagattattggtcaccacctccagtttctgaatttgtgagactggggtggggcctgagaatttgc

SEQ ID NO: 1947 - RNA, 92 nt, Homo sapiens
  source 1..92: mol_type = genomic RNA
ggaaccttagtaaggtttggatagatgcaataaagtatgtccacagctgaaaggacatactttattgcatgtatccaaaccttactaattca

SEQ ID NO: 1948 - RNA, 70 nt, Homo sapiens
  source 1..70: mol_type = genomic RNA
catgtgtcccctggcacgctatttgaggtttactatggaacctcaagtagtctgaccaggggacacatga

SEQ ID NO: 1949 - RNA, 54 nt, Homo sapiens
  source 1..54: mol_type = genomic RNA
acgcgggtgcgggccggcggggtagaagccacccggcccggcccggcccggcga

SEQ ID NO: 1950 - RNA, 63 nt, Homo sapiens
  source 1..63: mol_type = genomic RNA
tggtggcggcggtagttatgggcttctctttctcaccagcagcccctgggccgccgcctccct

SEQ ID NO: 1951 - RNA, 64 nt, Homo sapiens
  source 1..64: mol_type = genomic RNA
agtcttctcctggggctttggtggctatggttgactgggccactcagagcagaaggatgagatg

SEQ ID NO: 1952 - RNA, 79 nt, Homo sapiens
  source 1..79: mol_type = genomic RNA
ccgacgcggagagcggctctaggtgggtttggcggcggcgaggacaccgccgctccctctagggtcgctcggagcgtga

SEQ ID NO: 1953 - RNA, 72 nt, Homo sapiens
  source 1..72: mol_type = genomic RNA
cgagcctctttcggctttccagtttgtctcggtcctttggaacgtggcaaacgtggaagccgagagggctct

SEQ ID NO: 1954 - RNA, 83 nt, Homo sapiens
  source 1..83: mol_type = genomic RNA
ccaaatttaaaacttaaacctctactaagtttccatgaaaagaacccatgggaacttagtagaggtttaagttttaaatttga

SEQ ID NO: 1955 - RNA, 80 nt, Homo sapiens
  source 1..80: mol_type = genomic RNA
tggcagacccttgctctctcactctccctaatggggctgaagacagctcaggggcagggtggggggtgttgtttttgttt

SEQ ID NO: 1956 - RNA, 67 nt, Homo sapiens
  source 1..67: mol_type = genomic RNA
tggtgggggtggggggtgttgtttttgtttttgagacagagtcttgctccgtcgcccaggccggagt

SEQ ID NO: 1957 - RNA, 91 nt, Homo sapiens
  source 1..91: mol_type = genomic RNA
aaggaacaggggacacttgtaatggagaacactaagctatggactgctatggactgctagtgctctccgttacaagtatcccctgttacct

SEQ ID NO: 1958 - RNA, 78 nt, Homo sapiens
  source 1..78: mol_type = genomic RNA
ttgcctaccttgttagtctcatgatcagacacaaatatggctctttgtggctggtcatgaggctaacaaggtaggcac

SEQ ID NO: 1959 - RNA, 61 nt, Homo sapiens
  source 1..61: mol_type = genomic RNA
atctcaatgagtgtgtggttctaaatgactcatagtcaagggaccaagcattcattatgaa

SEQ ID NO: 1960 - RNA, 70 nt, Homo sapiens
  source 1..70: mol_type = genomic RNA
aaaagcctgtccctaagtccctcccagccttccagagttggtgccaggaaggatttagggacaggctttg

SEQ ID NO: 1961 - RNA, 81 nt, Homo sapiens
  source 1..81: mol_type = genomic RNA
tcctcctcccatcaatcacaaatgtccttaatggcatttaaggattgctattaaggacatttgtgattcacgggaggaggt

SEQ ID NO: 1962 - RNA, 81 nt, Homo sapiens
  source 1..81: mol_type = genomic RNA
acctcctcccgtgaatcacaaatgtccttaatagcaatccttaaatgccattaaggacatttgtgattgatgggaggagga

SEQ ID NO: 1963 - RNA, 86 nt, Homo sapiens
  source 1..86: mol_type = genomic RNA
ggccgaggctgagctgaggagcctccaaacctgtagacagggtcatgcagtactaggggcgagcctcatcccctgcagccctggcc

SEQ ID NO: 1964 - RNA, 71 nt, Homo sapiens
  source 1..71: mol_type = genomic RNA
gaaaccaagtccgagcgtggctggcgcgggaaagttcgggaacgcgcgcggccgtgctcggagcagcgcca

SEQ ID NO: 1965 - RNA, 71 nt, Homo sapiens
  source 1..71: mol_type = genomic RNA
gcagaggtgagttgacctccacagggccacccagggagtaagtagccaagtggaagttactttacctctgt

SEQ ID NO: 1966 - RNA, 60 nt, Homo sapiens
  source 1..60: mol_type = genomic RNA
ggagtgggctggtggttttttaagaggaagggagacctaagctagcacatgagcacgctc

SEQ ID NO: 1967 - RNA, 70 nt, Homo sapiens
  source 1..70: mol_type = genomic RNA
agtgagcaacccagtgggctatggaaatgtgtggaagatggcatttctatttctcagtggggctcttacc

SEQ ID NO: 1968 - RNA, 98 nt, Homo sapiens
  source 1..98: mol_type = genomic RNA
aataaaaattgaatagtgagcaacccagtgggctatggaaatgtgtggaagatggcatttctatttctcagtggggctcttacctattactcatcaac

SEQ ID NO: 1969 - RNA, 62 nt, Homo sapiens
  source 1..62: mol_type = genomic RNA
aaaaaacaacatacttagtgcatacccatataatattaggggtggtctgttgttgtttttct

SEQ ID NO: 1970 - RNA, 83 nt, Homo sapiens
  source 1..83: mol_type = genomic RNA
gggtttcctctgcctttttttccaatgaaaataacgaaacctgttatttcccattgagggggaaaaaggcgggagaagcccca

SEQ ID NO: 1971 - RNA, 57 nt, Homo sapiens
  source 1..57: mol_type = genomic RNA
agaggcaccgcctgcccagtgacatgcgtttaacggccgcggtaccctaactgtgca

SEQ ID NO: 1972 - RNA, 63 nt, Homo sapiens
  source 1..63: mol_type = genomic RNA
gcatgctgggcgaggctggcatctagcacaggcggtagatgcttgctcttgccattgcaatga

SEQ ID NO: 1973 - RNA, 73 nt, Homo sapiens
  source 1..73: mol_type = genomic RNA
actgtccttcagccagagctggctgaagggcagaagggaactgtccttcagccagagctggctgaagggcaga

SEQ ID NO: 1974 - RNA, 62 nt, Homo sapiens
  source 1..62: mol_type = genomic RNA
ggtagggggcgggctccggcgctgggaccccactagggtggcgccttggccccgccccgccc

SEQ ID NO: 1975 - RNA, 62 nt, Homo sapiens
  source 1..62: mol_type = genomic RNA
gggggtggggctagtgatgcaggacgctggggactggagaagtcctgcctgaccctgtccca

SEQ ID NO: 1976 - RNA, 84 nt, Homo sapiens
  source 1..84: mol_type = genomic RNA
atagtttctgcaatgctcaaatctctggccaaagaccagaacttaatggtctctggtaagagatttgggcatattagaaactaa

SEQ ID NO: 1977 - RNA, 68 nt, Homo sapiens
  source 1..68: mol_type = genomic RNA
acatttggtcacaccagtccacattaacgtggaccagacaatattaatgtggactggtgtgaccaaaa

SEQ ID NO: 1978 - RNA, 80 nt, Homo sapiens
  source 1..80: mol_type = genomic RNA
ctgcagcgtgcttctccaggccccgcgcgcggacagacacacggacaagtcccgccaggggctgggcgcgcgccagccgg

SEQ ID NO: 1979 - RNA, 73 nt, Homo sapiens
  source 1..73: mol_type = genomic RNA
ccagagatgggaaggccttccggtgattatcacagccatgcctttacctccagaaggcctttccatctctgtc

SEQ ID NO: 1980 - RNA, 84 nt, Homo sapiens
  source 1..84: mol_type = genomic RNA
agttttagttaccctggtcatctgcagtctgaaaatacaaaatggaaaattccagactgtggctgaccagaggtaactgaaacc

SEQ ID NO: 1981 - RNA, 66 nt, Homo sapiens
  source 1..66: mol_type = genomic RNA
aagaaatgtaaacaggctttttgctcagtggagttattttgagcaaaaagcttatttacatttctg

SEQ ID NO: 1982 - RNA, 61 nt, Homo sapiens
  source 1..61: mol_type = genomic RNA
acatcagctcatataatcctcgaagctgcctttagaaatgaggaaactgaagctgagaggg

SEQ ID NO: 1983 - RNA, 89 nt, Homo sapiens
  source 1..89: mol_type = genomic RNA
acctccgggacggctgggcgccggcggccgggagatccgcgcttcctgaatcccggccggcccgcccggcgcccgtccgcccgcgggtc

SEQ ID NO: 1984 - RNA, 66 nt, Homo sapiens
  source 1..66: mol_type = genomic RNA
agggctgggctggcagggcaagtgctgcagatctttgtctaagcagcccctgccttggatctccca

SEQ ID NO: 1985 - RNA, 69 nt, Homo sapiens
  source 1..69: mol_type = genomic RNA
aagactgagaggagggaactggtgagttgtacatagaaatgctttctaactccttgtctcagtctgttt

SEQ ID NO: 1986 - RNA, 76 nt, Homo sapiens
  source 1..76: mol_type = genomic RNA
caggagagaaagtactgcccagaagctaaagtgtagatcaaacgcataatggctgaggtagtagtttcttgaactt

SEQ ID NO: 1987 - RNA, 64 nt, Homo sapiens
  source 1..64: mol_type = genomic RNA
tatgtgacctcggatgaatcactgaaatatgtctgagcttctgtttcatcagatgtcacatttt

SEQ ID NO: 1988 - RNA, 81 nt, Homo sapiens
  source 1..81: mol_type = genomic RNA
agcctttagcaagttgtaatctttttgctgatggagggtcttgcctccatggggatggctgatgatgatggtgctgaaggc

SEQ ID NO: 1989 - RNA, 83 nt, Homo sapiens
  source 1..83: mol_type = genomic RNA
acaatgtagatatttaagcaggaaatagaatttacatataaatttctatttgtttctatttcctgcttaaatatctacattgc

SEQ ID NO: 1990 - RNA, 92 nt, Homo sapiens
  source 1..92: mol_type = genomic RNA
ctaagataatgtcctccaggttcatctctgttgtcatttgtggcatggaccatttgtgacaatagagatgaacatggaggatattatcttaa

SEQ ID NO: 1991 - RNA, 73 nt, Homo sapiens
  source 1..73: mol_type = genomic RNA
ggaggctgggctgggacggacacccggcctccactttctgtggcaggtacctcctccatgtcggcccgccttg

SEQ ID NO: 1992 - RNA, 77 nt, Homo sapiens
  source 1..77: mol_type = genomic RNA
tggcctctgccatcagaccatctgggttcaagtttggctccatctttatgaaatgggtggtctgaggcaagtggtct

SEQ ID NO: 1993 - RNA, 52 nt, Homo sapiens
  source 1..52: mol_type = genomic RNA
tctgggctgagccgagctgggttaagccgagctgggttgggctgggctgggt

SEQ ID NO: 1994 - RNA, 70 nt, Homo sapiens
  source 1..70: mol_type = genomic RNA
aggacccagcggggctgggcgcgcggagcagcgctgggtgcagcgcctgcgccggcagctgcaagggccg

SEQ ID NO: 1995 - RNA, 94 nt, Homo sapiens
  source 1..94: mol_type = genomic RNA
ctttaatactatctcaaactaaaggatatagaaggttttccctttctcttgccctgaaaccttctgtatcctttattttgagatagtattagaa

SEQ ID NO: 1996 - RNA, 94 nt, Homo sapiens; identical to SEQ ID NO: 1995
  source 1..94: mol_type = genomic RNA

SEQ ID NO: 1997 - RNA, 94 nt, Homo sapiens; identical to SEQ ID NO: 1995
  source 1..94: mol_type = genomic RNA

SEQ ID NO: 1998 - RNA, 68 nt, Homo sapiens
  source 1..68: mol_type = genomic RNA
gtgtatgtgagggagtaggatgtatggttgttagatagacaactacaatcttttctcacaacagacag

SEQ ID NO: 1999 - RNA, 87 nt, Homo sapiens
  source 1..87: mol_type = genomic RNA
aaaaaaaagggaaagaagaactgttgcatttgccctgcactcagtttgcacagggtaaatgcaatagttcttctttcccttttttta

SEQ ID NO: 2000 - RNA, 77 nt, Homo sapiens
  source 1..77: mol_type = genomic RNA
ctcagcccgggcaatatagtgagacctcgtctctacaaaaaattgagacagggcctcactgtatcgcccaggctgga

SEQ ID NO: 2001 - RNA, 86 nt, Homo sapiens
  source 1..86: mol_type = genomic RNA
attctaggtggggagactgacggctggaggcccataagctgtctaaaacttcggcccccagatttctggtctccccacttcagaac

SEQ ID NO: 2002 - RNA, 57 nt, Homo sapiens
  source 1..57: mol_type = genomic RNA
gttgagacaggcaggattggggaaacatcttttacctcgtctcttgcctgttttaga

SEQ ID NO: 2003 - RNA, 81 nt, Homo sapiens
  source 1..81: mol_type = genomic RNA
gcgggaggtgtaacaggactggactcccggcagccccagggcaggggcgtggggagctggtcctagctcagcgctcccgga

SEQ ID NO: 2004 - RNA, 86 nt, Homo sapiens
  source 1..86: mol_type = genomic RNA
agggagaagggtcggggcagggagggcagggcaggctctggggtggggggtctgtgagtcagccacggctctgcccacgtctcccc

SEQ ID NO: 2005 - RNA, 79 nt, Homo sapiens
  source 1..79: mol_type = genomic RNA
aggtaaatatgatgaaactcacagctgaggagcttagcaagtagctaaggccagagcttgtgtttgggtggtgtggctg

SEQ ID NO: 2006 - RNA, 83 nt, Homo sapiens
  source 1..83: mol_type = genomic RNA
tgggggaaaagtgctgggattgattagtgatgtctgctggggaaccggggctcagggatgataactgtgctgagaagccccct

SEQ ID NO: 2007 - RNA, 58 nt, Homo sapiens
  source 1..58: mol_type = genomic RNA
aacctcagcagtgcgcagggctgcactgtctccgtctgcggcctgcagtaagcgggta

SEQ ID NO: 2008 - RNA, 70 nt, Homo sapiens
  source 1..70: mol_type = genomic RNA
gtgtgccacctgcgtgttttctgtccaaatcagaaaaggatttggacagaaaacacgcaggaagaaggaa

SEQ ID NO: 2009 - RNA, 54 nt, Homo sapiens
  source 1..54: mol_type = genomic RNA
cctgcgtgttttctgtccaaatccttttctgatttggacagaaaacacgcaggt

SEQ ID NO: 2010 - RNA, 60 nt, Homo sapiens
  source 1..60: mol_type = genomic RNA
tcggctaaggaagtcctgtgctcagttttgtagcatcaaaactaggatttctcttgttac

SEQ ID NO: 2011 - RNA, 87 nt, Homo sapiens
  source 1..87: mol_type = genomic RNA
gcgggcgttgcctgggggcctcgcagggggagatccagcccaggctggttccgctgactctgcctgtaggccggtggcgtcttctgg

SEQ ID NO: 2012 - RNA, 69 nt, Homo sapiens
  source 1..69: mol_type = genomic RNA
gcgggggaccgagagggcctcggctgtgtgaggactagaggcggccgaggcccgggccggttcccccga

SEQ ID NO: 2013 - RNA, 69 nt, Homo sapiens
  source 1..69: mol_type = genomic RNA
gaacgatagcagcatgaacctgtctcactgcagaattattttgagacaggcttatgctgctatccttca

SEQ ID NO: 2014 - RNA, 115 nt, Homo sapiens
  source 1..115: mol_type = genomic RNA
tagctgggtggatgtgttcttttgaaggatagcagcataagcctgtctcaaaataattctgcagtgagacaggttcatgctgctatcgttccaaagaggaagggtaatcactgtc

SEQ ID NO: 2015 - RNA, 75 nt, Homo sapiens
  source 1..75: mol_type = genomic RNA
gtcagaggggggatgtgcatgctggttggggtgggctgcctgtggaccaatcagcgtgcacttccccaccctgaa

SEQ ID NO: 2016 - RNA, 87 nt, Homo sapiens
  source 1..87: mol_type = genomic RNA
tgcggtgacatcagggcccagtccctgctgtcatgccccaggtgacgtgctgggctgacagcagggctggccgctaacgtcactgtc

SEQ ID NO: 2017 - RNA, 70 nt, Homo sapiens
  source 1..70: mol_type = genomic RNA
ccagaagtggtctgcaaagagatgactgtgaatccaagatccacatcagctctgtgctgcctacatctga

SEQ ID NO: 2018 - RNA, 90 nt, Homo sapiens
  source 1..90: mol_type = genomic RNA
tattctactgagagtacagatctttatatatatgatcattatatgtatgatgagatcattatatgtatgatctggacacccagtagaatc

SEQ ID NO: 2019 - RNA, 78 nt, Homo sapiens
  source 1..78: mol_type = genomic RNA
atgacaggccatcagcagtccaatgaagacatgaagacccaatgtcttcattggactgctgatggcccgtcactggga

SEQ ID NO: 2020 - RNA, 56 nt, Homo sapiens
  source 1..56: mol_type = genomic RNA
cgaccgcacccgcccgaagctgggtcaaggagcccagcaggacgggagcgcggcgc

SEQ ID NO: 2021 - RNA, 47 nt, Homo sapiens
  source 1..47: mol_type = genomic RNA
gcctaggagtccttggtcagtggggacatggagaaggcttctgagga

SEQ ID NO: 2022 - RNA, 51 nt, Homo sapiens
  source 1..51: mol_type = genomic RNA
acagaccccggggagcccggcggtgaagctcctggtatcctgggtgtctga

SEQ ID NO: 2023 - RNA, 71 nt, Homo sapiens
  source 1..71: mol_type = genomic RNA
tgagaatgtggaaggaggttgccggacgctgctggctgccttccagcgtccacttccctttctctctctcc

SEQ ID NO: 2024 - RNA, 60 nt, Homo sapiens
  source 1..60: mol_type = genomic RNA
tgtgaatgacccccttccagagccaaaatcaccagggatggaggaggggtcttgggtact

SEQ ID NO: 2025 - RNA, 59 nt, Homo sapiens
  source 1..59: mol_type = genomic RNA
aactgggtcccagtcttcacagttggtttctgacacgtggacctggctgggacgatgtg

SEQ ID NO: 2026 - RNA, 88 nt, Homo sapiens
  source 1..88: mol_type = genomic RNA
atgtggtagatatatgcacgatatatatactgccctgcttttatacatacatacatacatacctatatcgtgcatatatctaccacat

SEQ ID NO: 2027 - RNA, 88 nt, Homo sapiens
  source 1..88: mol_type = genomic RNA
atgtggtagatatatgcacgatataggtatgtatgtatgtatgtataaaagcagggcagtatatatatcgtgcatatatctaccacat

SEQ ID NO: 2028 - RNA, 70 nt, Homo sapiens
  source 1..70: mol_type = genomic RNA
tgagccgagctgagcttagctgggctgagctaaccagggctgggctgagctgggctgagctgagctgagc

SEQ ID NO: 2029 - RNA, 78 nt, Homo sapiens
  source 1..78: mol_type = genomic RNA
gagcttggatgagctgggctgaactgggctgggttgagctgggctgggctgagttgagccaggctgatctgggctgag

SEQ ID NO: 2030 - RNA, 60 nt, Homo sapiens
  source 1..60: mol_type = genomic RNA
tgagctgggctctgctgtgctgtgctgagcagggctgagctgaactgggctgagctgggc

SEQ ID NO: 2031 - RNA, 55 nt, Homo sapiens
  source 1..55: mol_type = genomic RNA
aagctgcatggaccaggacttggcacctttggccttagtcctgcctgtaggttta

SEQ ID NO: 2032 - RNA, 61 nt, Homo sapiens
  source 1..61: mol_type = genomic RNA
gagggcagcgtgggtgtggcggaggcaggcgtgaccgtttgccgccctctcgctgctctag

SEQ ID NO: 2033 - RNA, 79 nt, Homo sapiens
  source 1..79: mol_type = genomic RNA
tggcaagtctccgcatatgcctggctagctcctccacaaatgcgtgtggaggagctagccaggcatatgcagagcgtca

SEQ ID NO: 2034 - RNA, 54 nt, Homo sapiens
  source 1..54: mol_type = genomic RNA
ggacaagggcggcgcgaccggcccggggctcttgggcggccgcgtttcccctcc

SEQ ID NO: 2035 - RNA, 79 nt, Homo sapiens
  source 1..79: mol_type = genomic RNA
ccgggactttgtgggttctgaccccacttggatcacgccgacaacactggtcttgaagtcagaacccgcaaagtcctgg

SEQ ID NO: 2036 - RNA, 80 nt, Homo sapiens
  source 1..80: mol_type = genomic RNA
tagattcagaactcgtgttcaaagcctttagcccagcaatgggagagtgctaaaggcttcaagcacgagttctgaatcta

SEQ ID NO: 2037 - RNA, 84 nt, Homo sapiens
  source 1..84: mol_type = genomic RNA
cccttacttggatctgcaattagtattttaatcatagattgtatttagttagtttttaatactaactgcagattcaagtgaggg

SEQ ID NO: 2038 - RNA, 68 nt, Homo sapiens
  source 1..68: mol_type = genomic RNA
gactcggctgcggtggacaagtccggctccagaacctggacaccgctcagccggccgcggcaggggtc

SEQ ID NO: 2039 - RNA, 69 nt, Homo sapiens
  source 1..69: mol_type = genomic RNA
ttgctaagtaggctgagattgatgtcaggttatccccaagcataacctcactctcaccttgctttgcag

SEQ ID NO: 2040 - RNA, 90 nt, Homo sapiens
  source 1..90: mol_type = genomic RNA
ctgtgggctgggccagggagcagctggtgggtgggaagtaagatctgacctggactccatcccacccaccccctgtttcctggcccacag

SEQ ID NO: 2041 - RNA, 66 nt, Homo sapiens
  source 1..66: mol_type = genomic RNA
ggggggcagggggcagagggcatcagaggacagccgcctggtgcccatgccatacttttgcctcag

SEQ ID NO: 2042 - RNA, 82 nt, Homo sapiens
  source 1..82: mol_type = genomic RNA
cacaactgcatggcatcgtcccctggtggctgtggcctagggcaagccacaaagccactcagtgatgatgccagcagttgtg

SEQ ID NO: 2043 - RNA, 78 nt, Homo sapiens
  source 1..78: mol_type = genomic RNA
gtgtgccctagcatttataatcatgtgttcattcacatgatcataagtggacacatgaccataaatgctaaagcacac

SEQ ID NO: 2044 - RNA, 84 nt, Homo sapiens
  source 1..84: mol_type = genomic RNA
gcggcggtgctctgcctctttctccatccaccctggtccaggtccacagcagtggagagagaaaagagacagaaggatggccgt

SEQ ID NO: 2045 - RNA, 77 nt, Homo sapiens
  source 1..77: mol_type = genomic RNA
tgatagggaaaccaggcaagaaatattgtctcctcaagttgcgacgagacagtagttcttgcctggtttctctatca

SEQ ID NO: 2046 - RNA, 63 nt, Homo sapiens
  source 1..63: mol_type = genomic RNA
actgggaagaggagctgagggacattgcggagagggtctcacattgtccctctcccttcccag

SEQ ID NO: 2047 - RNA, 80 nt, Homo sapiens
  source 1..80: mol_type = genomic RNA
ccaggagggtgaagatggtgctgtgctgaggaaaggggatgcagagccctgcccagcaccaccacctcctatgctcctgg

SEQ ID NO: 2048 - RNA, 72 nt, Homo sapiens
  source 1..72: mol_type = genomic RNA
tgtgggactgcaaatgggagctcagcacctgcctgccacccacgcagaccagcccctgctctgttcccacag

SEQ ID NO: 2049 - RNA, 64 nt, Homo sapiens
  source 1..64: mol_type = genomic RNA
tctgggcgaggggtgggctctcagaggggctggcagtactgctctgaggcctgcctctccccag

SEQ ID NO: 2050 - RNA, 76 nt, Homo sapiens
  source 1..76: mol_type = genomic RNA
ttctgtagagattatcaggcctctttctaccttccaaggctcagaaggtagaatgaggcctgacatatctgcagga

SEQ ID NO: 2051 - RNA, 76 nt, Homo sapiens; identical to SEQ ID NO: 2050
  source 1..76: mol_type = genomic RNA

SEQ ID NO: 2052 - RNA, 73 nt, Homo sapiens
  source 1..73: mol_type = genomic RNA
cggcgacggcggggtgggtgaggtcgggccccaagactcggggtttgccgggcgcctcagttcaccgcggccg

SEQ ID NO: 2053 - RNA, 78 nt, Homo sapiens
  source 1..78: mol_type = genomic RNA
tattggacgaggggactggttaatagaactaactaaccagaactattttgttctgttaacccatcccctcatctaata

SEQ ID NO: 2054 - RNA, 83 nt, Homo sapiens
  source 1..83: mol_type = genomic RNA
ttgtccaattctctgagcaaggcttaacaccaaagggttaagggtttgctctggagttaagggttgcttggagaattggagaa

SEQ ID NO: 2055 - RNA, 76 nt, Homo sapiens
  source 1..76: mol_type = genomic RNA
ctggctggttgtgggatctggaggcatctggggttggaatgtgaccccagtctccttttccctcatcatctgccag

SEQ ID NO: 2056 - RNA, 74 nt, Homo sapiens
  source 1..74: mol_type = genomic RNA
ccaagggcacaccggggatggcagagggtcgtgggaaagtgttgaccctcgtcaggtccccggggagcccctgg

SEQ ID NO: 2057 - RNA, 75 nt, Homo sapiens
  source 1..75: mol_type = genomic RNA
aggctggcgtgggctgagggcaggaggcctgtggccggtcccaggcctcctgcttcctgggctcaggctcggttt

SEQ ID NO: 2058 - RNA, 53 nt, Homo sapiens
  source 1..53: mol_type = genomic RNA
aatgtggaagtggtctgaggcatatagagtatatgccaagaacactaccatat

SEQ ID NO: 2059 - RNA, 65 nt, Homo sapiens
  source 1..65: mol_type = genomic RNA
gctgcccttcactcagagcatctacacccactaccggtgagtgtggatcctggaggaatcgtggc

SEQ ID NO: 2060 - RNA, 81 nt, Homo sapiens
  source 1..81: mol_type = genomic RNA
gaaactgctgaagctgccatgtctaagaagaaaactttggagaaaaattttcttcttagacatggcaacgtcaacagtttc

SEQ ID NO: 2061 - RNA, 73 nt, Homo sapiens
  source 1..73: mol_type = genomic RNA
ctgttgacgttgccatgtctaagaagaaaatttttctccaaagttttcttcttagacatggcagcttcagcag

SEQ ID NO: 2062 - RNA, 74 nt, Homo sapiens
  source 1..74: mol_type = genomic RNA
actccttctgcagctctggtggaaaatggagaagacttttcctttcctccatctcccccagggcctggtggagt

SEQ ID NO: 2063 - RNA, 75 nt, Homo sapiens
  source 1..75: mol_type = genomic RNA
tttactctgaactagctctgtggatcctgacagacagcctgatagacaggatccacagagctagtccagagtaaa

SEQ ID NO: 2064 - RNA, 67 nt, Homo sapiens
  source 1..67: mol_type = genomic RNA
tctatttagccaattgtccatctttagctattctgaatgcctaaagatagacaattggctaaataga

SEQ ID NO: 2065 - RNA, 81 nt, Homo sapiens
  source 1..81: mol_type = genomic RNA
cacaatttctatttagccaattgtctatctttaggcattcagaatagctaaagatggacaattggctaaatagacactgtg

SEQ ID NO: 2066 - RNA, 76 nt, Homo sapiens
  source 1..76: mol_type = genomic RNA
ctgtggtggagctgagctccatggacgtgcagtggcatctgtcattgctgccttcctggagctcaggcccttgcag

SEQ ID NO: 2067 - RNA, 71 nt, Homo sapiens
  source 1..71: mol_type = genomic RNA
gttgggggctggggtgcccactccgcaagttatcactgagcgacttccggtctgtgagccccgtcctccgc

SEQ ID NO: 2068 - RNA, 79 nt, Homo sapiens
  source 1..79: mol_type = genomic RNA
ctcgaggtgctgggggacgcgtgagcgcgagccgcttcctcacggctcggccgcggcgcgtagcccccgccacatcggg

SEQ ID NO: 2069 - RNA, 79 nt, Homo sapiens
  source 1..79: mol_type = genomic RNA
atcacttaaatacatgtcagattgtatgcctacaaaatccctccagactggcatacaatctgacatgtatttaagagat

SEQ ID NO: 2070 - RNA, 81 nt, Homo sapiens
  source 1..81: mol_type = genomic RNA
tgtctaaattgcatgtcagattgtaattcccaggcccttcctccaatactgggaattacaatttgacatgcaatttagaca

SEQ ID NO: 2071 - RNA, 66 nt, Homo sapiens
  source 1..66: mol_type = genomic RNA
tgactggggagcagaaggagaacccaagaaaagctgacttggaggtccctccttctgtccccacag

SEQ ID NO: 2072 - RNA, 70 nt, Homo sapiens
  source 1..70: mol_type = genomic RNA
agggaaaaaaaaaaggatttgtcttgtagccaggatattgttttaaagaaaatcctttttgtttttccag

SEQ ID NO: 2073 - RNA, 62 nt, Homo sapiens
  source 1..62: mol_type = genomic RNA
gcctcccttcacttcctggccatccaggcatctgtgtctgtgtccgggaagtggaggagggc

SEQ ID NO: 2074 - RNA, 75 nt, Homo sapiens
  source 1..75: mol_type = genomic RNA
ctctaggaagcgaccatgatgtaacttcacagactctccaaaagtctgaagttacatcatggtcgcttcctagag

SEQ ID NO: 2075 - RNA, 73 nt, Homo sapiens
  source 1..73: mol_type = genomic RNA
tattttaagaccgaagactgtgcgctaatctcttagcactgaagattagtgcatagtctttggtctcaaaata

SEQ ID NO: 2076 - RNA, 81 nt, Homo sapiens
  source 1..81: mol_type = genomic RNA
ggctgcttctcgcctctgtccagctgtgtggccttggacaagcctcttggttacacagctggacagaggcacgaaacagcc

SEQ ID NO: 2077 - RNA, 59 nt, Homo sapiens
  source 1..59: mol_type = genomic RNA
gtccaggcaggagccggactggacctcagggaagaggctgacccggcccctcttgcggc

SEQ ID NO: 2078 - RNA, 87 nt, Homo sapiens
  source 1..87: mol_type = genomic RNA
cccaggcgcccgctcccgacccacgccgcgccgccgggtccctcctccccggagaggctgggctcgggacgcgcggctcagctcggg

SEQ ID NO: 2079 - RNA, 77 nt, Homo sapiens
  source 1..77: mol_type = genomic RNA
catgagaaatcctgctggtcaaccatagccctggtcagactctccggggctgtgattgaccagcaggacttctcatg

SEQ ID NO: 2080 - RNA, 72 nt, Homo sapiens
  source 1..72: mol_type = genomic RNA
tgaatgaaagagccagtggtgagacagtgagttgattacttctcactgtttcaccactggctctttggttca

SEQ ID NO: 2081 - RNA, 80 nt, Homo sapiens
  source 1..80: mol_type = genomic RNA
gcaaagcagcaattgttctttggtctttcagccatgacctgaccttctgtctgtgagaccaaagaactactttgcttggc

SEQ ID NO: 2082 - RNA, 74 nt, Homo sapiens
  source 1..74: mol_type = genomic RNA
ggaaaaaacaaggtattgttcagacttatgatttttggggtcaaagattctgagcaataacctattaaaaaacc

SEQ ID NO: 2083 - RNA, 75 nt, Homo sapiens
  source 1..75: mol_type = genomic RNA
gtcttttttctgtgatagagattctttgctttgttagaaacaaaaagcaaagaatctctatcacagaaaaaagat

SEQ ID NO: 2084 - RNA, 77 nt, Homo sapiens
  source 1..77: mol_type = genomic RNA
tatcttttttctgtgatagagattctttgctttttgtttctaacaaagcaaagaatctctatcacagaaaaaagacg

SEQ ID NO: 2085 - RNA, 66 nt, Homo sapiens
  source 1..66: mol_type = genomic RNA
tataagaactcttgcagtcttagatgttataaaaatatatatctgaattgtaagagttgttagcac

SEQ ID NO: 2086 - RNA, 72 nt, Homo sapiens
  source 1..72: mol_type = genomic RNA
ggcaacgggaatgcaggctgtatctgcagggcattgtgctaacaggtgcaggctgcagacctgtcacaggcc

SEQ ID NO: 2087 - RNA, 80 nt, Homo sapiens
  source 1..80: mol_type = genomic RNA
tgcccctggtctgagttcctggagcctggtctgtcactggggaagtccagagctccaaggctcagtgcccaggggacgca

SEQ ID NO: 2088 - RNA, 81 nt, Homo sapiens
  source 1..81: mol_type = genomic RNA
gacacgcaagacgaggcgggcctggaggtgcaccagttctggccgctggtggagatccagtgctcgcccgatctcaagttc

SEQ ID NO: 2089 - RNA, 82 nt, Homo sapiens
  source 1..82: mol_type = genomic RNA
gcaccaggggtacctctctactgacttgcaacatacatttgtcttggtgtgttgcaagtcggtggagacgtacccttggtgc

SEQ ID NO: 2090 - RNA, 69 nt, Homo sapiens
  source 1..69: mol_type = genomic RNA
tagcccagggcttggagtggggcaaggttgttggtgatatggcttcctctcccttcctgccctggctag

SEQ ID NO: 2091 - RNA, 76 nt, Homo sapiens
  source 1..76: mol_type = genomic RNA
ggcttcctgtatctgctgggctttctggtgttggcagcccaagatgacaccctgggcccagcaggagccagaagcc

SEQ ID NO: 2092 - RNA, 80 nt, Homo sapiens
  source 1..80: mol_type = genomic RNA
acctgaggagccagccctcctcccgcacccaaacttggagcacttgacctttggctgttggagggggcaggctcgcgggt

SEQ ID NO: 2093 - RNA, 83 nt, Homo sapiens
  source 1..83: mol_type = genomic RNA
gtctactcccagggtgccaagctgtttcgtgttccctccctaggggatcccaggtaggggcagcagaggacctgggcctggac

SEQ ID NO: 2094 - RNA, 70 nt, Homo sapiens
  source 1..70: mol_type = genomic RNA
ggtttctccttgaggagacatggtgggggccggtcaggcagcccatgccatgtgtcctcatggagaggcc

SEQ ID NO: 2095 - RNA, 60 nt, Homo sapiens
  source 1..60: mol_type = genomic RNA
gagcaggcgaggctgggctgaacccgtgggtgaggagtgcagcccagctgaggcctctgc

SEQ ID NO: 2096 - RNA, 85 nt, Homo sapiens
  source 1..85: mol_type = genomic RNA
ggagcactcccaggtcctccaggccatgagctgcggccctgatgtctctactccagccacggactgagagtgcataggagtgtcc

SEQ ID NO: 2097 - RNA, 63 nt, Homo sapiens
  source 1..63: mol_type = genomic RNA
gttttacttgatacccacactgcctgggtgggacactcaggcagtgtgggtatcagataaaac

SEQ ID NO: 2098 - RNA, 75 nt, Homo sapiens
  source 1..75: mol_type = genomic RNA
gtttaaagaatactgtgaatttcactgtcacaaattcaaataaagtgagagtggaattcacagtatttaaggaat

SEQ ID NO: 2099 - RNA, 80 nt, Homo sapiens
  source 1..80: mol_type = genomic RNA
caaatacataggtgttatcctatccatttgcctctctcagaaaatagagtcaaatggacaggataacacctatgtatttg

SEQ ID NO: 2100 - RNA, 74 nt, Homo sapiens
  source 1..74: mol_type = genomic RNA
cctgcaggaggcagtgggcgagcaggcggggcagcccaatgccatgggcctgatctcaccgctgcctccttccc

SEQ ID NO: 2101 - RNA, 70 nt, Homo sapiens
  source 1..70: mol_type = genomic RNA
caaagccactgcaagacggatactgtcatctattccagaagatgacaatgtccattttgcagtggctttg

SEQ ID NO: 2102 - RNA, 78 nt, Homo sapiens
  source 1..78: mol_type = genomic RNA
gggcccagaagggggcgcagtcactgacgtgaagggaccacatcccgcttcatgtcagtgactcctgccccttggtct

SEQ ID NO: 2103 - RNA, 80 nt, Homo sapiens
  source 1..80: mol_type = genomic RNA
tgcttctcctggggtcttcctctacatttccacctagacgggcctgggtcaaaatgtagaggaagaccccagaaggagca

SEQ ID NO: 2104 - RNA, 74 nt, Homo sapiens
  source 1..74: mol_type = genomic RNA
agcaattggagaagattgcagagtaagttcctgattaagaaatggaatttactctgcaatcttctccaattgct

SEQ ID NO: 2105 - RNA, 74 nt, Homo sapiens
  source 1..74: mol_type = genomic RNA
tcagtgaggtctggggatgaggacagtgtgtcctgaaattcacaggactgactcctcaccccagtgcacgagga

SEQ ID NO: 2106 - RNA, 63 nt, Homo sapiens
  source 1..63: mol_type = genomic RNA
ccttggccaccacacctaccccttgtgaatgtcgggcaatgggtgatgggtgtggtgtccaca

SEQ ID NO: 2107 - RNA, 79 nt, Homo sapiens
  source 1..79: mol_type = genomic RNA
ttatgcatattagcaatacagtacaaatatagtgtgtttgatttgcactgtagttgtattgtattgccactctgtataa

SEQ ID NO: 2108 - RNA, 75 nt, Homo sapiens
  source 1..75: mol_type = genomic RNA
cttatcctagacactaggcatgtgagtgattgtcttcctcactcaatcagtcacatatctagtgtctagaatgag

SEQ ID NO: 2109 - RNA, 71 nt, Homo sapiens
  source 1..71: mol_type = genomic RNA
ctcacaagatcaatcacttggtaattgctgtgataacaactcagcaattaccaagtgattggttttgtgag

SEQ ID NO: 2110 - RNA, 82 nt, Homo sapiens
  source 1..82: mol_type = genomic RNA
gctacggggagcggggaggaagtgggcgctgcttctgcgttatctggaaggagcagcccactcctgtcctgggctctgtggt

SEQ ID NO: 2111 - RNA, 80 nt, Homo sapiens
  source 1..80: mol_type = genomic RNA
ggttccggagccccggcgcgggcgggttctggggtgtagacgctgctggccagcccgccccagccgaggttctcggcacc

SEQ ID NO: 2112 - RNA, 67 nt, Homo sapiens
  source 1..67: mol_type = genomic RNA
tttaggagagagatgccgccttgctccttgaacaggaggagcaaggcggcatctctctgatactaaa

SEQ ID NO: 2113 - RNA, 72 nt, Homo sapiens
  source 1..72: mol_type = genomic RNA
ctgcttcaacaacagtgacttgctctccaatggtatccagtgattcgttgaagaggaggtgctctgtagcag

SEQ ID NO: 2114 - RNA, 56 nt, Homo sapiens
  source 1..56: mol_type = genomic RNA
gaccgagtggggtgagggcaggtggttcttcccgaagcagctctcgcctcttcgtc

SEQ ID NO: 2115 - RNA, 70 nt, Homo sapiens
  source 1..70: mol_type = genomic RNA
aaatgtgcatcaggccagaagacatgagccctttggaaaggtctcgtgtcttctggcttgatgcacattt

SEQ ID NO: 2116 - RNA, 82 nt, Homo sapiens
  source 1..82: mol_type = genomic RNA
gacaggattccagtacaggtctctcatttccttcatgattaggaatactactttgaaatgagagacctgtactgtatctgtt

SEQ ID NO: 2117 - RNA, 75 nt, Homo sapiens
  source 1..75: mol_type = genomic RNA
gtccccatttttctcccactaccaggctcccataagggtcgaatgggatccagacagtgggagaaaaatggggac

SEQ ID NO: 2118 - RNA, 77 nt, Homo sapiens
  source 1..77: mol_type = genomic RNA
attttggccaactctgaccccttaggttgatgtcagaatgaggtgtaccaacctaggtggtcagagttggccaaaat

SEQ ID NO: 2119 - RNA, 79 nt, Homo sapiens
  source 1..79: mol_type = genomic RNA
ggggaatgaaagttggctgcagttaaggtggctaatcagctgatggtgccaccttaactgcagccaattctaattcccc

SEQ ID NO: 2120 - RNA, 84 nt, Homo sapiens
  source 1..84: mol_type = genomic RNA
catactttgtctccatgtttccttcccccttctgtatacatgtatacaggaggaagggggaaggaaacatggagacaaagtgtg

SEQ ID NO: 2121 - RNA, 72 nt, Homo sapiens
  source 1..72: mol_type = genomic RNA
ggcagtgtttaggccacagccacccatgtgtaggggtggctacacatgggtggctgtggcctaaacactgcc

SEQ ID NO: 2122 - RNA, 51 nt, Homo sapiens
  source 1..51: mol_type = genomic RNA
agctgtacctgaaaccaagcacctgtttgtgacttggcttcagttactagc

SEQ ID NO: 2123 - RNA, 84 nt, Homo sapiens
  source 1..84: mol_type = genomic RNA
acaatgatgacttgtatgttatagatttgtgattacattaaaacttaaaatttcacaaatctataatatgcaggtcatcactgt

SEQ ID NO: 2124 - RNA, 76 nt, Homo sapiens
  source 1..76: mol_type = genomic RNA
aagcctggcatatttggtataacttaagcaccaggtaaaatctggtgcttaagttgtaccaagtatagccaagttt

SEQ ID NO: 2125 - RNA, 89 nt, Homo sapiens
  source 1..89: mol_type = genomic RNA
gggcctggtcatggtcaagccaggttccatcaagccccaccagaaggtggaggcccaggtgagggctccaggtgacggtgggcagggtt

SEQ ID NO: 2126 - RNA, 60 nt, Homo sapiens
  source 1..60: mol_type = genomic RNA
ggcaggagggctgtgccaggttggctgggccaggcctgacctgccagcacctccctgcag

SEQ ID NO: 2127 - RNA, 81 nt, Homo sapiens
  source 1..81: mol_type = genomic RNA
agttggtgggggagccatgagataagagcacctcctagagaatgttgaactaaaggtgccctctctggctcctccccaaag

SEQ ID NO: 2128 - RNA, 89 nt, Homo sapiens
  source 1..89: mol_type = genomic RNA
acgcaaaatgaactgaaccaggagtgagcttcgtgtacattatctattagaaaatgaagtaccttctggttcagctagtccctgtgcgt

SEQ ID NO: 2129 - RNA, 90 nt, Homo sapiens
  source 1..90: mol_type = genomic RNA
gtgtctctctggagaccctgcagccttcccacccaccagggagctttccatgggctgtggggaaggcgtcagtgtcgggtgagggaacac

SEQ ID NO: 2130 - RNA, 58 nt, Homo sapiens
  source 1..58: mol_type = genomic RNA
agggccagaggagcctggagtggtcgggtcgactgaacccaggttccctctggccgca

SEQ ID NO: 2131 - RNA, 55 nt, Homo sapiens
  source 1..55: mol_type = genomic RNA
aatctgccagcttccacagtggcagattttcccatagtgggaagctggcagattc

SEQ ID NO: 2132 - RNA, 67 nt, Homo sapiens
  source 1..67: mol_type = genomic RNA
gtgggaggggagaggcagcaagcacacagggcctgggactagcatgctgacctccctcctgccccag

SEQ ID NO: 2133 - RNA, 72 nt, Homo sapiens
  source 1..72: mol_type = genomic RNA
tctgtttcctcatttatctgttgggaagctaactgtgaccttagcgtcccagcagataaatgaggaaacaga

SEQ ID NO: 2134 - RNA, 76 nt, Homo sapiens
  source 1..76: mol_type = genomic RNA
cgcaggcctctggcggagcccattccatgccagatgctgagcgatggctggtgtgtgctgctccacaggcctggtg

SEQ ID NO: 2135 - RNA, 70 nt, Homo sapiens
  source 1..70: mol_type = genomic RNA
ccctgccagtgctgggggccacatgagtgtgcagtcatccacacacaagtggcccccaacactggcaggg

SEQ ID NO: 2136 - RNA, 76 nt, Homo sapiens
  source 1..76: mol_type = genomic RNA
gagggagctgtagagcagggagcaggaagctgtgtgtgtccagccctgacctgtcctgttctgcccccagcccctc

SEQ ID NO: 2137 - RNA, 76 nt, Homo sapiens
  source 1..76: mol_type = genomic RNA
ggtcgcttaaatcccaatgctagacccggtggcaatcaaggtctagccaccaggtctagcattgggatttaagccc

SEQ ID NO: 2138 - RNA, 70 nt, Homo sapiens
  source 1..70: mol_type = genomic RNA
ctcgggcccgaccgcgccggcccgcacctcccggcccggagctgcgggctgcggtcagggcgatcccggg

SEQ ID NO: 2139 - RNA, 69 nt, Homo sapiens
  source 1..69: mol_type = genomic RNA
tgcagtgcctaatttgaacaccttcggtattcatcaaaaataccaaaggtgctcaaattagacattgca

SEQ ID NO: 2140 - RNA, 47 nt, Homo sapiens
  source 1..47: mol_type = genomic RNA
aggcaggttatctgggctgccatctcccactggctgcttgcctgcct

SEQ ID NO: 2141 - RNA, 81 nt, Homo sapiens
  source 1..81: mol_type = genomic RNA
ctgcacaggatgcgaggatgctgacagtgcctcacagccgcacaggaccgaggatgctgacggtgcctcacagccacacag

SEQ ID NO: 2142 - RNA, 87 nt, Homo sapiens
  source 1..87: mol_type = genomic RNA
ggtcgcatttctccttcttaccagcgcgttttcagtttcatagggaagcctttccatgaaactggagcgcctggaggagaaggggcc

SEQ ID NO: 2143 - RNA, 74 nt, Homo sapiens
  source 1..74: mol_type = genomic RNA
gggaggaagaagggaggaggagcggaggggcccttgtcttcccagagcctctcccttcctcccctccccctccc

SEQ ID NO: 2144 - RNA, 63 nt, Homo sapiens
  source 1..63: mol_type = genomic RNA
gccaaggactgatcctctcgggcagggagtcagaggggaccgcccgagaggatccgtccctgc

SEQ ID NO: 2145 - RNA, 90 nt, Homo sapiens
  source 1..90: mol_type = genomic RNA
cgggcggggcgggtccggccgcctccgagcccggccggcagcccccggccttaaagcgcgggctgtccggaggggtcggctttcccaccg

SEQ ID NO: 2146 - RNA, 85 nt, Homo sapiens
  source 1..85: mol_type = genomic RNA
tcaggcaaagggatatttacagatactttttaaaatttgtttgagttgaggcagattaaatatctgtattctcctttgcctgcag

SEQ ID NO: 2147 - RNA, 69 nt, Homo sapiens
  source 1..69: mol_type = genomic RNA
gctggccggatgggacaggaggcatgaatgagccatctttccaatgcctttctgtcttttctggtccag

SEQ ID NO: 2148 - RNA, 82 nt, Homo sapiens
  source 1..82: mol_type = genomic RNA
gtaatcacatctaaagactagacttcgctatgaccaggccatagtaaacatcatagtatgtctagtctttaggtttgattac

SEQ ID NO: 2149 - RNA, 62 nt, Homo sapiens
  source 1..62: mol_type = genomic RNA
gtgagtggggctcccgggacggcgcccgccctggccctggcccggcgacgtctcacggtccc

SEQ ID NO: 2150 - RNA, 71 nt, Homo sapiens
  source 1..71: mol_type = genomic RNA
gtgtctgtgccggtcccaggagaacctgcagaggcatcgggtcagcggtgctcctgcgggccgacactcac

SEQ ID NO: 2151 - RNA, 54 nt, Homo sapiens
  source 1..54: mol_type = genomic RNA
agggaaggaggcttggtcttagcacggggtctaaggcccgggctttcctcccag

SEQ ID NO: 2152 - RNA, 82 nt, Homo sapiens
  source 1..82: mol_type = genomic RNA
tggctggctgaggtttggggaggatttgctggtgctagagaggaaagcagaccctacccaaccccacgccctactacagcca

SEQ ID NO: 2153 - RNA, 61 nt, Homo sapiens
  source 1..61: mol_type = genomic RNA
cctgcggggacaggccagggcatctaggctgtgcacagtgacgcccctcctgcccccacag

SEQ ID NO: 2154 - RNA, 56 nt, Homo sapiens
  source 1..56: mol_type = genomic RNA
cgctcgggcggaggtggttgagtgccgactggcgcctgacccaccccctcccgcag

SEQ ID NO: 2155 - RNA, 74 nt, Homo sapiens
  source 1..74: mol_type = genomic RNA
cccggagccagaggacccgtagctgctagaagggcaggggtgtggcttctgggggctggtcttcagctctggcg

SEQ ID NO: 2156 - RNA, 72 nt, Homo sapiens
  source 1..72: mol_type = genomic RNA
agtgtctccttgtggatctcaaggatgtgcttccacatagcagcatgttcttcagatggacaaggagacact

SEQ ID NO: 2157 - RNA, 83 nt, Homo sapiens
  source 1..83: mol_type = genomic RNA
atatctacacaaggccaaaggaagagaacagatatatccacagtacacttggctgttctctttctttagccttgtgtagatat

SEQ ID NO: 2158 - RNA, 89 nt, Homo sapiens
  source 1..89: mol_type = genomic RNA
acgcgcctgatgcggacctgggttagcggagtgaggcccagtggtcaccgccgccctccgcaggtccaggttgccgtgcgcatgtgcct

SEQ ID NO: 2159 - RNA, 72 nt, Homo sapiens
  source 1..72: mol_type = genomic RNA
agattcagctttcccttcagagcctggctttggcatctatgaaagccaggctctgaagggaaagttgaatct

SEQ ID NO: 2160 - RNA, 78 nt, Homo sapiens
  source 1..78: mol_type = genomic RNA
gggataaaatgcagggaggcgctcactctctgctgccgattctgcaccagagatggttgccttcctatattttgtgtc

SEQ ID NO: 2161 - RNA, 77 nt, Homo sapiens
  source 1..77: mol_type = genomic RNA
ttccagcccgaggcctctgtgacgtcacggtgtctgcgggaggagaccatgacgtcacagaggcttcgcgctctgag

SEQ ID NO: 2162 - RNA, 71 nt, Homo sapiens
  source 1..71: mol_type = genomic RNA
ggtgagtgggagccggtggggctggagtaagggcacgcccggggctgccccacctgctgaccaccctcccc

SEQ ID NO: 2163 - RNA, 83 nt, Homo sapiens
  source 1..83: mol_type = genomic RNA
catttaggactagatgttggaattagacagaaaaaagttagacacaaaaaattgtgtctaattccaacatctagtcctaaatg

SEQ ID NO: 2164 - RNA, 80 nt, Homo sapiens
  source 1..80: mol_type = genomic RNA
gccatggtgtttagattgaacatgaagttagaattcttaagtatcaaaactaaattcatgttcaatctaaaccccatggc

SEQ ID NO: 2165 - RNA, 82 nt, Homo sapiens
  source 1..82: mol_type = genomic RNA
ggacaaggtgtgcatgcctgacccgttgtcagacctggaaaaagggccggctgtgggcagggagggcatgcgcactttgtcc

SEQ ID NO: 2166 - RNA, 75 nt, Homo sapiens
  source 1..75: mol_type = genomic RNA
ctgataccccaaatcttgatcagaagccttgatcagaagctaggaaggcttctgatcaagatttgtggtgtcaag

SEQ ID NO: 2167 - RNA, 92 nt, Homo sapiens
  source 1..92: mol_type = genomic RNA
cctgtccctcctgccctgcgcctgcccagccctcctgctctggtgactgaggaccgccaggcaggggctggtgctgggcggggggcggcggg

SEQ ID NO: 2168 - RNA, 88 nt, Homo sapiens
  source 1..88: mol_type = genomic RNA
tcttccccatggatgtggaaggagttatctgtcaccagtcagataactgtcaccagtcagttaactcctttcacacccatggggaaga

SEQ ID NO: 2169 - RNA, 77 nt, Homo sapiens
  source 1..77: mol_type = genomic RNA
tggtgattttgaacgtagctatccaccactcagcctggaaaaagctgagtgattgatagctatgttcaaaatcacca

SEQ ID NO: 2170 - RNA, 76 nt, Homo sapiens
  source 1..76: mol_type = genomic RNA
ctgaagctccttctgaaagagcagttggtgtttattttttactaaatagcaattgctcttttggaaggaacttgag

SEQ ID NO: 2171 - RNA, 78 nt, Homo sapiens
  source 1..78: mol_type = genomic RNA
acatgggcccgcgggcgctcctggccgccgcccgacttcggggccagccgggggcagagcgcgcgggagcccgagcgt

SEQ ID NO: 2172 - RNA, 74 nt, Homo sapiens
  source 1..74: mol_type = genomic RNA
aaactttgattctctctggatcccatggatatgggaactgtgatgtccaggagatccagagagaatcagagttt

SEQ ID NO: 2173 - RNA, 77 nt, Homo sapiens
  source 1..77: mol_type = genomic RNA
gaggagaggtgggatggagagaaggtatgagctaaaaatccccaagctctgccatcctccctcccctacttctcccc

SEQ ID NO: 2174 - RNA, 58 nt, Homo sapiens
  source 1..58: mol_type = genomic RNA
gagttatggggtcatctatccttcccttggaaaatgatctgagatgacactgtagctc

SEQ ID NO: 2175 - RNA, 74 nt, Homo sapiens
  source 1..74: mol_type = genomic RNA
gctctagcctaattttagatctggtctgcttcagtttcactccaagcagacttgacctacaattagcctagagc

SEQ ID NO: 2176 - RNA, 74 nt, Homo sapiens; identical to SEQ ID NO: 2175
  source 1..74: mol_type = genomic RNA

SEQ ID NO: 2177 - RNA, 78 nt, Homo sapiens
  source 1..78: mol_type = genomic RNA
gtgattgcctctgatcaggcaaaattgcagactgtcttcccaaatagcctgcaactttgcctgatcagaggcagtcac

SEQ ID NO: 2178 - RNA, 78 nt, Homo sapiens
  source 1..78: mol_type = genomic RNA
tgctccccagcctttctatgctcctgttctgctttatttcatcaaagcagaacaggagcatagaaaggctggggagca

SEQ ID NO: 2179 - RNA, 78 nt, Homo sapiens
  source 1..78: mol_type = genomic RNA
tgctccccagcctttctatgctcctgttctgctttgatgaaataaagcagaacaggagcatagaaaggctggggagca

SEQ ID NO: 2180 - RNA, 76 nt, Homo sapiens
  source 1..76: mol_type = genomic RNA
tatattgttgtctggtatgtagtaggtaataactgacaaacagacaattgcctaacatgtgccagaaaacaacata

SEQ ID NO: 2181 - RNA, 75 nt, Homo sapiens
  source 1..75: mol_type = genomic RNA
attaagcttttaattttttgtttcggtcactcttgatagcagacattgactgaaacaaaaaattaaaagctttat

SEQ ID NO: 2182 - RNA, 80 nt, Homo sapiens
  source 1..80: mol_type = genomic RNA
ctatatgcagtggaccaggatggcaagggctctcctgaaaggacagtagagcccttgccatcctggtccactgcatatag

SEQ ID NO: 2183 - RNA, 80 nt, Homo sapiens
  source 1..80: mol_type = genomic RNA
ctatatgcagtggaccaggatggcaagggctctactgtcctttcaggagagcccttgccatcctggtccactgcatatag

SEQ ID NO: 2184 - RNA, 86 nt, Homo sapiens
  source 1..86: mol_type = genomic RNA
tagaatatttcggcattctagatgagagatatatatatacctcatatgtatatggtatacctcatctagaatgctgtaatattcta

SEQ ID NO: 2185 - RNA, 80 nt, Homo sapiens
  source 1..80: mol_type = genomic RNA
tcacatgtccaattctgtaaaggaagaagaggtaagaagaagtgaagccctcttcttcctttgcagagttgaatatgtgg

SEQ ID NO: 2186 - RNA, 83 nt, Homo sapiens
  source 1..83: mol_type = genomic RNA
taaatgtcttactgcttttactgttccctcctagagtccattctttactctaggagggaatagtaaaagcagtaagacattta

SEQ ID NO: 2187 - RNA, 81 nt, Homo sapiens
  source 1..81: mol_type = genomic RNA
ggccagtgccagggggtcaggctcaaggaccagcccaaaggccaggcctgacccttgagcctgatccctagcactgatccc

SEQ ID NO: 2188 - RNA, 76 nt, Homo sapiens
  source 1..76: mol_type = genomic RNA
aggtgcacgctctagcggggattccaatattgggccaattcccccaatgttggaatcctcgctagagcgtgcactt

SEQ ID NO: 2189 - RNA, 79 nt, Homo sapiens
  source 1..79: mol_type = genomic RNA
attgcccagttctggatatgaagacaatcaagaaaagatttggtgttcttgattgtcttcatatctagaactgggcagt

SEQ ID NO: 2190 - RNA, 82 nt, Homo sapiens
  source 1..82: mol_type = genomic RNA
gggaaagcggagggcgcgcccagctcccgggctgattgcgctaacagtggccccggtgttggggcgcgtctgccgctgcccc

SEQ ID NO: 2191 - RNA, 77 nt, Homo sapiens
  source 1..77: mol_type = genomic RNA
tgactgggctgaggagatgctgggactgagagtgtcatggtggagcctccgtccctgctcatcctctccgcatgttg

SEQ ID NO: 2192 - RNA, 73 nt, Homo sapiens
  source 1..73: mol_type = genomic RNA
gtaggtggggacgcggcggcgctgctcctccgctgccgccgggagagtcggcgacgccgccagctccgcgcgc

SEQ ID NO: 2193 - RNA, 80 nt, Homo sapiens
  source 1..80: mol_type = genomic RNA
gggcatggcctgagaccaggactggatgcaccactctccctgtgatgaggtgaagccagctctggtctgggccatttcac

SEQ ID NO: 2194 - RNA, 84 nt, Homo sapiens
  source 1..84: mol_type = genomic RNA
cggtccagacgtggcgggggtggcggcggcatcccggacggcctgtgagggatgcgccgcccactgccccgcgccgcctgaccg

SEQ ID NO: 2195 - RNA, 80 nt, Homo sapiens
  source 1..80: mol_type = genomic RNA
aatgaaggattacggaccagctaagggaggcattaggatccttattcttgcctcccttagttggtccctaatccttcgtt

SEQ ID NO: 2196 - RNA, 82 nt, Homo sapiens
  source 1..82: mol_type = genomic RNA
catgctacgtatgtatacacctgatatgtgtatgtgtaaatacatatccacacacatagcaggtgtatatataggtagcctg

SEQ ID NO: 2197 - RNA, 79 nt, Homo sapiens
  source 1..79: mol_type = genomic RNA
caatgtgacatcgctttaccattcatgttcactgaaaggtagattttaaaaacatgaatggtaaagcgatgtcacattg

SEQ ID NO: 2198 - RNA, 84 nt, Homo sapiens
  source 1..84: mol_type = genomic RNA
taagaactggatatgatgactgaaataagctccatatcaatgagaatttcaatgggattatgtgcagtcaatgtccagtaatta

SEQ ID NO: 2199 - RNA, 74 nt, Homo sapiens
  source 1..74: mol_type = genomic RNA
gcagcccggtgagcgctcgctggcctggcagtgcgtcggaagaacagggcgggtggggccgcgcacatctctgc

SEQ ID NO: 2200 - RNA, 87 nt, Homo sapiens
  source 1..87: mol_type = genomic RNA
tttctcctcgctgcccgcacatcctgctccacagggcagagggaggccaagaagacctctgcactgtgagttggctggctggaggaa

SEQ ID NO: 2201 - RNA, 77 nt, Homo sapiens
  source 1..77: mol_type = genomic RNA
ttttaacatctggctatctcacgagactgtatgtcctaacagtgcttgtagtctcatgagatagccagatgttaaaa

SEQ ID NO: 2202 - RNA, 89 nt, Homo sapiens
  source 1..89: mol_type = genomic RNA
tgatatggaagaaatccagaagtggctaataatattgacactataacaataatgtcaatattattagccacttctggatttatgaatca

SEQ ID NO: 2203 - RNA, 81 nt, Homo sapiens
  source 1..81: mol_type = genomic RNA
taaatttgtgtctatactctgtcactttacttttggcctcaagtcattgcagtaaagtggcagagtatagacacaaattta

SEQ ID NO: 2204 - RNA, 71 nt, Homo sapiens
  source 1..71: mol_type = genomic RNA
gactcagaagacagagtgccacttactgaaaggttttttctctcagtaagtggcactctgtcttctgagtt

SEQ ID NO: 2205 - RNA, 75 nt, Homo sapiens
  source 1..75: mol_type = genomic RNA
aagtacaacttcggtatactttgtgaattggcttttacaaaagaccaactcacgaagtataccgaagtcatactt

SEQ ID NO: 2206 - RNA, 74 nt, Homo sapiens
  source 1..74: mol_type = genomic RNA
actgctaatatctaaatgcagcatgccagtcctgagatgcagggactggcatgctgcatttatatattagcagt

SEQ ID NO: 2207 - RNA, 80 nt, Homo sapiens
  source 1..80: mol_type = genomic RNA
ggagaaaggagtggaccgaggaaggaaggaaggcaaggctgtctgtccatccgtccgtctgtccacctacctgtcagtcc

SEQ ID NO: 2208 - RNA, 82 nt, Homo sapiens
  source 1..82: mol_type = genomic RNA
ttgaggcttggttttcttatgtgtaaaatgtaataacatttcttatgtttaaaacactttacacaagaaaaccaaggctcaa

SEQ ID NO: 2209 - RNA, 80 nt, Homo sapiens
  source 1..80: mol_type = genomic RNA
ctgactggcttgtatggaggttctagaccatgttagtgttcaagtctacatggatggaaaccttcaagcaggccaagcag

SEQ ID NO: 2210 - RNA, 74 nt, Homo sapiens
  source 1..74: mol_type = genomic RNA
agtgggatttaacataatagtgtggattgaatcacacacacatttcaacccacactatgatgttaaatcccatt

SEQ ID NO: 2211 - RNA, 73 nt, Homo sapiens
  source 1..73: mol_type = genomic RNA
tcagtgtatttggacggtaaggttaagcaaggtgcgtcgtatcttgcttaaccttgccctcgaaatacactga

SEQ ID NO: 2212 - RNA, 91 nt, Homo sapiens
  source 1..91: mol_type = genomic RNA
atagaaaataaaacacatactgctgtattgtcaggtagtgataggatttatcactacctgacaatacagtatgtgtttgttttatatattt

SEQ ID NO: 2213 - RNA, 103 nt, Homo sapiens
  source 1..103: mol_type = genomic RNA
ctgaagagtagagtgtgtggtcccagttcagaagtgttcctgagtaacttgtgcttataactcaggacacttctgaacttggaccatacaggtctccctgctt

SEQ ID NO: 2214 - RNA, 100 nt, Homo sapiens
  source 1..100: mol_type = genomic RNA
agctcagggcggctgcgcagagggctggactcagcggcggagctggctgctggcctcagttctgcctctgtccaggtccttgtgacccgcccgctctcct

SEQ ID NO: 2215 - RNA, 97 nt, Homo sapiens
  source 1..97: mol_type = genomic RNA
tcttcctctctgtcctctggaatttggtttctgaggcacttagtaggtgatagcatgactgactgcctcactgaccacttccagatgagggttactc

SEQ ID NO: 2216 - RNA, 99 nt, Homo sapiens
  source 1..99: mol_type = genomic RNA
atgagtttgctttgtgtcatcctcacaacaaccttgcagggtagagatgatttttcctacttttctaggttgttgggggctggggcagggggaacagag

SEQ ID NO: 2217 - RNA, 107 nt, Homo sapiens
  source 1..107: mol_type = genomic RNA
ggcacttgcttgggggttagtgaggacagggcaaattcacgagattgggttgtgcagaggctgacacttggattttcctgggcctcaggacttcctttcagacatgg

SEQ ID NO: 2218 - RNA, 110 nt, Homo sapiens
  source 1..110: mol_type = genomic RNA
aaccattagggggctgtggtttgccagggcaggaggtggaagggagccccatttacagtggtaacttcctttccctttccatcctggcaggcttcagagaactttaccag

SEQ ID NO: 2219 - RNA, 95 nt, Homo sapiens
  source 1..95: mol_type = genomic RNA
ggtaaaccttggtgactaattagagtctggctgatatggtttgacacagagctaaatcatatgaaccaaactctaattagtcaataatttctgtt

SEQ ID NO: 2220 - RNA, 94 nt, Homo sapiens
  source 1..94: mol_type = genomic RNA
gggctgacccctagggtcaggtgaggcccttggggcacagtggtgccatctcccctgtgctcccagggcctcgcctgtcccttgaggtcggccc

SEQ ID NO: 2221 - RNA, 100 nt, Homo sapiens
  source 1..100: mol_type = genomic RNA
gaccagaagtgttttggattttggactttttcagatttggggatatttgcattatacttatcctaaatctgaaagtccaaaacctgaaatgaccaataag

SEQ ID NO: 2222 - RNA, 120 nt, Homo sapiens
  source 1..120: mol_type = genomic RNA
gatccagggaaccctagagcagggggatggcagagcaaaattcatggcctacagctgcctcttgccaaactgcactggattttgtgtctcccattccccagagctgtctgaggtgctttg

SEQ ID NO: 2223 - RNA, 103 nt, Homo sapiens
  source 1..103: mol_type = genomic RNA
agatggtattgagtggatgctgttatatatacagccatgcactctgtagtttgggtacacagtgcatggctgtatatataacactatccattcatctttcagc

SEQ ID NO: 2224 - RNA, 100 nt, Homo sapiens
  source 1..100: mol_type = genomic RNA
gaagcgcttgcctagacgagacacagtgcataaaaacaacttttgggggacaggtatgttttcttgcagctgcggttgtaaggtcttggcaagacaagca

SEQ ID NO: 2225 - RNA, 76 nt, Homo sapiens
  source 1..76: mol_type = genomic RNA
agctttctacgggtttgtagctttgctggcatgttaagtgttgtcctacagtcgcaagcataagaaagagaaagta

SEQ ID NO: 2226 - RNA, 84 nt, Homo sapiens
  source 1..84: mol_type = genomic RNA
tctccagggtggccaggcggggccgggcctgagggatggaggggagcccatcagggctcagggattggatggaggtgatggggg

SEQ ID NO: 2227 - RNA, 84 nt, Homo sapiens
  source 1..84: mol_type = genomic RNA
aaggacttcagtgggatttctgagtagcatccttggaatctgcactcaagggatgctactcggaaatcccactgaagtcctttt

SEQ ID NO: 2228 - RNA, 85 nt, Homo sapiens
  source 1..85: mol_type = genomic RNA
tctgaggtacccggggcagattggtgtagggtgcaaagcctgcccgccccctaagccttctgcccccaactccagcctgtcagga

SEQ ID NO: 2229 - RNA, 93 nt, Homo sapiens
  source 1..93: mol_type = genomic RNA
gactgtggcgacggagacgacaagactgtgctggtcgcgggttgtggggtttaggtcaccggcaggggtctggagtccctggaggttagggct

SEQ ID NO: 2230 - RNA, 88 nt, Homo sapiens
  source 1..88: mol_type = genomic RNA
atcccagatcagatgccaaagccagtggggactggacaacatgatgagcccaaaccaatccacgctgagcttggcatctgatttggga

SEQ ID NO: 2231 - RNA, 100 nt, Homo sapiens
  source 1..100: mol_type = genomic RNA
cccgccaggtccacatgccagagtgtcaacgtgacccagccagcctccttcctgagctaggaggattaggaaatgaggctggctaggagcacagccaggg

SEQ ID NO: 2232 - RNA, 85 nt, Homo sapiens
  source 1..85: mol_type = genomic RNA
aaaagaaaaaaatcagtgaatgccttgaacctaacacactgccttttatgtggtaggtacagtgggctcactgaaacattcaact

SEQ ID NO: 2233 - RNA, 88 nt, Homo sapiens
  source 1..88: mol_type = genomic RNA
ctgggattacaggcgtgaaccaccgcgcccggcctaacttttaagaaacgtcggcccgggagcggtggctcacgcctgtaatcccagc

SEQ ID NO: 2234 - RNA, 70 nt, Homo sapiens
  source 1..70: mol_type = genomic RNA
agtagaggtggggtttcaccatgttggtcaggctggtctcaaactcctgacctcaggtgatccatccacc

SEQ ID NO: 2235 - RNA, 119 nt, Homo sapiens
  source 1..119: mol_type = genomic RNA
ccatgaggagctggcagtgggatggcctgggggtaggagcgtggcttctggagctagaccacatgggttcagatcccagcggtgcctctaactggccacaggaccttgggcagtcagct

SEQ ID NO: 2236 - RNA, 120 nt, Homo sapiens
  source 1..120: mol_type = genomic RNA
tcagccagcttatgacttgaccctctcacctgatttctaccaacctttcctcagctgatttctttctggggagagattggtagaaatcaggtgagagggtcatgccataagctggctaac

SEQ ID NO: 2237 - RNA, 76 nt, Homo sapiens
  source 1..76: mol_type = genomic RNA
gactaagggtgggatgagggattgaagtggagcaggaatgcgcttttctccactgaatcctcttttcctcaggtgg

SEQ ID NO: 2238 - RNA, 113 nt, Homo sapiens
  source 1..113: mol_type = genomic RNA
gggaggcatggaaatttctctggtttcaatgggtacgattattgtaagcaggatccattcaataatcggacccatttaaaccggagattttaaaagacaggaatagaatccca

SEQ ID NO: 2239 - RNA, 114 nt, Homo sapiens
  source 1..114: mol_type = genomic RNA
ggcccgccttttaggggcctcgctgtctgggcacaggcggatggacaggctggcctctggatgacctgccaaccgtcagagcccagacccacgtggcctcagttggggaccagg

SEQ ID NO: 2240 - RNA, 80 nt, Homo sapiens
  source 1..80: mol_type = genomic RNA
ggtcataccctggctccagccctgtcacatggttaatgttccacagccagtgactgagctggagccagggccactgcccc

SEQ ID NO: 2241 - RNA, 120 nt, Homo sapiens
  source 1..120: mol_type = genomic RNA
agttggccaggaccccaagcccccagcacttcattcttgctgtcctctcctggtctgggaggatagaagagaggataggaagaatgaagtgctgggcgcttagggggatcctggccaact

SEQ ID NO: 2242 - RNA, 92 nt, Homo sapiens
  source 1..92: mol_type = genomic RNA
ttagttccagcctcctggctcacctggaaccatttctcctgggaagcatggtagccaggagagtggattccaggtggtgagggcttggtact

SEQ ID NO: 2243 - RNA, 109 nt, Homo sapiens
  source 1..109: mol_type = genomic RNA
cctaggaaaggctgctggtaactgggatgggggttggggggaggtaagaagtctctgactcctcctctacctcatcccagttccatcacctgaagtggacctcttggga

SEQ ID NO: 2244 - RNA, 120 nt, Homo sapiens
  source 1..120: mol_type = genomic RNA
atttctttgggttaacttaaactcagcccttctaggcccattcttttcactcaggaattggataagcttttctgaggggtttggaatgggatggcagggagagtcaccagacaccatgaa

SEQ ID NO: 2245 - RNA, 115 nt, Homo sapiens
  source 1..115: mol_type = genomic RNA
gagcaaaaaccagagaacaacatgggagcgttcctaacccctaaggcaactggatgggagacctgacccatccagttctctgagggggctcttgtgtgttctacaaggttgttca

SEQ ID NO: 2246 - RNA, 115 nt, Homo sapiens
  source 1..115: mol_type = genomic RNA
tctgaggagacctgggctgtcagaggccagggaaggggacgagggttggggaacaggtggttagcacttcatcctcgtctccctcccaggttagaagggcccccctctctgaagg

SEQ ID NO: 2247 - RNA, 112 nt, Homo sapiens
  source 1..112: mol_type = genomic RNA
tatgggattccacagacaatgagtatcaatggcacaaactcattcttgaatttttgccagttcaagaagagactgagtcatcgaatgctctaaatgtcacttcacctcatgt

SEQ ID NO: 2248 - RNA, 113 nt, Homo sapiens
  source 1..113: mol_type = genomic RNA
atctgacacaaaatgtgaaccaagcaattctcaaaggagcctcccaggaaattcactttaggaagtcctaggaggctcctctgagagttgctaaaacaaaacattgagagtcc

SEQ ID NO: 2249 - RNA, 137 nt, Homo sapiens
  source 1..137: mol_type = genomic RNA
agccagacaagagggtcatggggagtcactgtcaacccagagcaggcactgcccctgcgaccagcctggggcatcggttggggtgcaggggtctgctggtgatgctttccatctctttgctttgtcctgattgtagc

SEQ ID NO: 2250 - RNA, 58 nt, Homo sapiens
  source 1..58: mol_type = genomic RNA
tatggtactccttaagctaacaggcccctgtcaccattagcttaaggagtaccagatc

SEQ ID NO: 2251 - RNA, 58 nt, Homo sapiens
  source 1..58: mol_type = genomic RNA
tgctggctcatttcatatgtgtgctgagaaaattcacacatatgaagtgagccagcac

SEQ ID NO: 2252 - RNA, 60 nt, Homo sapiens
  source 1..60: mol_type = genomic RNA
agccttccaggagaaatggagaccctatacatacctgtttccatgcctcctagaagttcc

SEQ ID NO: 2253 - RNA, 68 nt, Homo sapiens
  source 1..68: mol_type = genomic RNA
taggcacacttaaagttatagctacatcagttataactatatcagttaaaactttaagtgtgcctagg

SEQ ID NO: 2254 - RNA, 59 nt, Homo sapiens
  source 1..59: mol_type = genomic RNA
aaactaatatacccatattctggctaggtgatcatcagaatatgggtatattagtttgg

SEQ ID NO: 2255 - RNA, 59 nt, Homo sapiens
  source 1..59: mol_type = genomic RNA
aaactaatatacccatattctgatgatcacctagccagaatatgggtatattagtttgg

SEQ ID NO: 2256 - RNA, 60 nt, Homo sapiens
  source 1..60: mol_type = genomic RNA
cagggaaatgggaagaactagatttgaatccagacctttagttcttccctttgcccaatt

SEQ ID NO: 2257 - RNA, 59 nt, Homo sapiens
  source 1..59: mol_type = genomic RNA
tgaagtaccagctactcgagaggtcagaggattgctcctgaatagctgggactacaggt

SEQ ID NO: 2258 - RNA, 59 nt, Homo sapiens
  source 1..59: mol_type = genomic RNA
tatccagcttgttactatatgctttttaaatggggcacagagtgacaagctggttaaag

SEQ ID NO: 2259 - RNA, 53 nt, Homo sapiens
  source 1..53: mol_type = genomic RNA
atggtcacctccgggactcagccctgtgctgagccccgggcagtgtgatcatc

SEQ ID NO: 2260 - RNA, 63 nt, Homo sapiens
  source 1..63: mol_type = genomic RNA
actggcattagtgggactttttttttttttttttttaatgttaaaagtcccactaatgccagc

SEQ ID NO: 2261 - RNA, 60 nt, Homo sapiens
  source 1..60: mol_type = genomic RNA
ggctgggtgctcttgtgcagtgagcaacctacacaactgcacatggcaacctagctccca

SEQ ID NO: 2262 - RNA, 54 nt, Homo sapiens
  source 1..54: mol_type = genomic RNA
ttgccatacatagactttattgtgttgatcaacaataaagttcatgtatggcaa

SEQ ID NO: 2263 - RNA, 65 nt, Homo sapiens
  source 1..65: mol_type = genomic RNA
tgggagctaagctatgggtatactgagcttatgtatgcatctgcatacccatagcttagctccca

SEQ ID NO: 2264 - RNA, 84 nt, Homo sapiens
  source 1..84: mol_type = genomic RNA
gcattgggttagcaggttagcccagcatttcccttcctggacacacaggaggagaaatgctggactaatctgctaatccaatgc

SEQ ID NO: 2265 - RNA, 75 nt, Homo sapiens
  source 1..75: mol_type = genomic RNA
agtttttgaagagtattgccaccctttctagtccctattagactagaaagggtggcaatacctcttccaaaaact

SEQ ID NO: 2266 - RNA, 60 nt, Homo sapiens
  source 1..60: mol_type = genomic RNA
gaagaggtattgccaccctttctagtctaatagggactagaaagggtggcaatactcttc

SEQ ID NO: 2267 - RNA, 76 nt, Homo sapiens
  source 1..76: mol_type = genomic RNA
ggcccatgggtcttatcctgcaaggtgctgcagagacgaggcctgtagcaccttgcaggataaggtctactgggcc

SEQ ID NO: 2268 - RNA, 76 nt, Homo sapiens
  source 1..76: mol_type = genomic RNA
ggagcttgttacagatgcagattctctgacttcttactgcaccagtgaagtcaggatctgcatttgaataagaccc

SEQ ID NO: 2269 - RNA, 65 nt, Homo sapiens
  source 1..65: mol_type = genomic RNA
gctgaactctagcctgagcaacagagtgagatggtcttgttttgttgcccaggctggagtccagt

SEQ ID NO: 2270 - RNA, 79 nt, Homo sapiens
  source 1..79: mol_type = genomic RNA
ctctacatcacagcccagcagttatcacgggcccctcccctcaatgggcccgtgataactgcagggctgtgatgtagag

SEQ ID NO: 2271 - RNA, 82 nt, Homo sapiens
  source 1..82: mol_type = genomic RNA
tatcgtatcgtatcgtatcgtattgtattgtactgtattgtattgtactgtattgtatcgtatcgtatcgtatcgtatcgta

SEQ ID NO: 2272 - RNA, 77 nt, Homo sapiens
  source 1..77: mol_type = genomic RNA
cctcacttatctgactctgaaatcttctaaatggtacccactttatttagaacgttttagggtcaaataagtacagg

SEQ ID NO: 2273 - RNA, 83 nt, Homo sapiens
  source 1..83: mol_type = genomic RNA
gaaacactttgcctttttacaggagtttattatgttttggacatagaaacataacaaacacctgtaaaacagcaaagtgtttc

SEQ ID NO: 2274 - RNA, 78 nt, Homo sapiens
  source 1..78: mol_type = genomic RNA
agcgtggtagcatacacctgtagtcctagatactcaggagggtgagtatctaggactacaggtgtgtgctaccacgct

SEQ ID NO: 2275 - RNA, 73 nt, Homo sapiens
  source 1..73: mol_type = genomic RNA
cttttaatttcagctactacctctattaggatttgggagttatactaatagaggtaatagttgaaattaagag

SEQ ID NO: 2276 - RNA, 68 nt, Homo sapiens
  source 1..68: mol_type = genomic RNA
ggacaagcttgctctgagctccgagaaagctgacagacagctgcttggtgttcagagcttgtctgtcc

SEQ ID NO: 2277 - RNA, 69 nt, Homo sapiens
  source 1..69: mol_type = genomic RNA
gacagtacaaataataccacagtgggtgtacctcatgtgtgtacaccctgtgatattatttgtaatatc

SEQ ID NO: 2278 - RNA, 59 nt, Homo sapiens
  source 1..59: mol_type = genomic RNA
tacaaataataccacagtgggtgtacctcatgtgtgtacaccctgtgatattatttgta

SEQ ID NO: 2279 - RNA, 87 nt, Homo sapiens
  source 1..87: mol_type = genomic RNA
gatattatgaataatatcacagtaggtgttcacacataatgtgtacaccatgtgtgtacacccatgtgatatttgaagtagtatgtc

SEQ ID NO: 2280 - RNA, 91 nt, Homo sapiens
  source 1..91: mol_type = genomic RNA
tataacattgtatatacccactgtgatattaagagtaatagctctctaggttattatgaataatatcacagtaggtgtacacaatgttgta

SEQ ID NO: 2281 - RNA, 77 nt, Homo sapiens
  source 1..77: mol_type = genomic RNA
tgtgtacaccaactgtgatattaggagtcctatttatttttaggatattaggaataatatcacagtaggtgtacaca

SEQ ID NO: 2282 - RNA, 73 nt, Homo sapiens
  source 1..73: mol_type = genomic RNA
ctgggaagttagttcatttcagtctgtgctgtgagctagccagcagtggctctgaaatgaactcaaactctag

SEQ ID NO: 2283 - RNA, 76 nt, Homo sapiens
  source 1..76: mol_type = genomic RNA
gccaactgcagatcatgggactgtctcagccccatatgtatctgaaggctgagaagtcccatgatccgcacttggc

SEQ ID NO: 2284 - RNA, 85 nt, Homo sapiens
  source 1..85: mol_type = genomic RNA
caaggcctatctatctagattcttcttggcctctctgagcatgcattcctgagactccaagaagaatctagacagataggccttg

SEQ ID NO: 2285 - RNA, 85 nt, Homo sapiens
  source 1..85: mol_type = genomic RNA
gtgctcatttaagtagtctgatgcctactactgatgacatacaatgtaagtgctcatttaggcgtcagactacctaaatgagcac

SEQ ID NO: 2286 - RNA, 78 nt, Homo sapiens
  source 1..78: mol_type = genomic RNA
agcatattctcaagtagtttcatgataaagggtgtatgagagatcaaccctttatcatgaaacgcttgaggatacgct

SEQ ID NO: 2287 - RNA, 72 nt, Homo sapiens
  source 1..72: mol_type = genomic RNA
ctgtgcacctgggggagtgcagtgattgtggaatgcaaagtcccacaatcactgtactccccaggtgcacag

SEQ ID NO: 2288 - RNA, 90 nt, Homo sapiens
  source 1..90: mol_type = genomic RNA
ctgtacccctgccccaacaaggaaggacaagaggtgtgagccacacacacgcctggcctcctgtctttccttgttggagcagggatgtag

SEQ ID NO: 2289 - RNA, 71 nt, Homo sapiens
  source 1..71: mol_type = genomic RNA
ttaattaatgcattaaattattgaaggcccttgggcaccccaggccttcaataatttaatgcatttattga

SEQ ID NO: 2290 - RNA, 82 nt, Homo sapiens
  source 1..82: mol_type = genomic RNA
gattggactttattgtcacgttctgattggttagcctaagacttgttctgatccaatcagaacatgaaaataacgtccaatc

SEQ ID NO: 2291 - RNA, 82 nt, Homo sapiens; identical to SEQ ID NO: 2290
  source 1..82: mol_type = genomic RNA

SEQ ID NO: 2292 - RNA, 84 nt, Homo sapiens
  source 1..84: mol_type = genomic RNA
gcctcaactcctgggatatgttgctgatccaacctgaaatccttctgtaggttgagtcagcaacatatcccatgacttttgggt

SEQ ID NO: 2293 - RNA, 56 nt, Homo sapiens
  source 1..56: mol_type = genomic RNA
ttgccgtccccttcctcgtcttttcccctcaggagaagtcgggaaggtggcggcgg

SEQ ID NO: 2294 - RNA, 77 nt, Homo sapiens
  source 1..77: mol_type = genomic RNA
tgatcttgtttaggccatcatcccattatgctaagtccatgggcaaacataacaggatgatggcctaaacaagacca

SEQ ID NO: 2295 - RNA, 89 nt, Homo sapiens
  source 1..89: mol_type = genomic RNA
tccccatttacacaggccatgagccccgaaacacccatcccaggattgctgatgggtgtttcggggctcatggcctgtgtaaatgggga

SEQ ID NO: 2296 - RNA, 80 nt, Homo sapiens
  source 1..80: mol_type = genomic RNA
agctaggtcttctggataacatgctgaagcttctacgtcattcagcacttgcttcagcatgttttccagaggatctagct

SEQ ID NO: 2297 - RNA, 81 nt, Homo sapiens
  source 1..81: mol_type = genomic RNA
tgtaagaacacgtttgaatgctgtacaaggcacatatgtgaacattgtaccacatgtacagctttcaaacatgctcttata

SEQ ID NO: 2298 - RNA, 85 nt, Homo sapiens
  source 1..85: mol_type = genomic RNA
attacagacatgagcgactgtgcctgaccaaaagtcaacattaaacaacaaatcttggccaggcacagtggctcatgcctgtaat

SEQ ID NO: 2299 - RNA, 13 nt, synthetic construct
  misc_feature 1..13: note = Description of Artificial Sequence: Synthetic oligonucleotide
  source 1..13: mol_type = other RNA
gccaggtaagtat

SEQ ID NO: 2300 - RNA, 12 nt, synthetic construct
  misc_feature 1..12: note = Description of Artificial Sequence: Synthetic oligonucleotide
  source 1..12: mol_type = other RNA
ccaggtaagtat

SEQ ID NO: 2301 - RNA, 11 nt, synthetic construct
  misc_feature 1..11: note = Description of Artificial Sequence: Synthetic oligonucleotide
  source 1..11: mol_type = other RNA
caggtaagtat

SEQ ID NO: 2302-2304 - skipped (3 entries)

SEQ ID NO: 2305 - RNA, 10 nt, synthetic construct
  misc_feature 1..10: note = Description of Artificial Sequence: Synthetic oligonucleotide
  source 1..10: mol_type = other RNA
caggtaagta

SEQ ID NO: 2306-2307 - skipped (2 entries)

SEQ ID NO: 2308 - DNA, 20 bp, synthetic construct
  misc_feature 1..20: note = Description of Artificial Sequence: Synthetic oligonucleotide
  source 1..20: mol_type = other DNA
atcgactctcgagccttctc
